(19) United States
(12) Patent Application Publication
(10) Pub. No.: US 2021/0254182 A1
(43) Pub. Date: Aug. 19, 2021

(54) METHODS AND TOOLS FOR PLANT PATHOGEN ASSESSMENT

(71) Applicant: UNIVERSITÉ LAVAL, Québec (CA)

(72) Inventors: Geneviève ARSENAULT-LABRECQUE, Québec (CA); Chloé DUSSAULT-BENOIT, Lévis (CA); Richard R. BELANGER, Québec (CA); Humira SONAH, Srinagar (IN); François BELZILE, Québec (CA)

(21) Appl. No.: 16/973,317

(22) PCT Filed: Jun. 18, 2019
(86) PCT No.: PCT/CA2019/050856

§ 371 Date: Dec. 8, 2020

Related U.S. Application Data
(60) Provisional application No. 62/686,242, filed on Jun. 18, 2018.

(51) Int. Cl. C12Q 1/6895; A01H 1/04

(52) U.S. Cl. CPC C12Q 1/6895; C12Q 2600/156; A01H 1/04

(57) ABSTRACT

Described herein are methods, products and tools for plant pathogen assessment and management. Also described are collections, kits and packages comprising reagents (e.g. oligonucleotides) and uses thereof, for example for plant pathogen assessment. In an embodiment, the pathogen is a Phytophthora pathogen, in a further embodiment Phytophthora sojae. In an embodiment the plant is soybean.

### CROSS-REFERENCE TO RELATED APPLICATIONS

[0001] The present application claims the benefit of U.S. Provisional Application Ser. No. 62/686,242 filed on Jun. 18, 2018, which is incorporated herein by reference in its entirety.

### SEQUENCE LISTING

[0002] This application contains a Sequence Listing in computer readable form entitled “G11229_399_SeqList.txt”, created on Jun. 18, 2019 and having a size of about 33,873 KB. The computer readable form is incorporated herein by reference in its entirety.

### TECHNICAL FIELD

[0003] The present invention generally relates to plant pathogen assessment, and more particularly to the assessment of Phytophthora pathogens.

### BACKGROUND ART

[0004] Phytophthora sojae (Kauf. & Gerd.), a hemibiotrophic oomycete causing stem and root rot in soybean, is among the top ten plant-pathogenic oomycetes/fungi of both scientific and economic importance (Kamoun et al. 2015). Management of P. sojae relies mostly on the development of cultivars with major resistance (Rps) genes. The development of stem and root rot caused by P. sojae is determined by the gene-for-gene relationship between resistance (Rps) genes in soybean and their matching avirulence (Avr) genes in the pathogen. Typically, Rps genes code for proteins having nucleotide-binding site (NBS) and leucine-rich repeat (LRR), while P. sojae Avr genes code for small effector proteins mostly with RXLR and DEER amino acid motifs. The NBS-LRR proteins from soybean recognize the RXLR effectors encoded by Avr genes from P. sojae, inducing an appropriate defense response (Sahoo et al. 2017; Song et al. 2013). The pathogen can avoid recognition conferred by Rps genes through various mutations such as a substitutions, frameshift mutations, partial or complete deletions, large insertions, recombinations, or changes in expression of Avr genes (Tyler and Gijzen 2014; Goss et al. 2013).

[0005] To date, over 27 major Rps genes have been identified in soybean (Sahoo et al. 2017) and about 12 Avr genes have been identified and characterized in P. sojae (Gijzen et al. 1996; May et al. 2002; MacGregor et al. 2002; Whisson 1995; Tyler et al. 1995). Most of the Avr genes are clustered together on P. sojae chromosomes, and many of them are candidate paralogs. For instance, Avr1a and Avr1c have very similar sequences (Na et al. 2014). In addition, some of the gene pairs earlier thought to be different genes, such as Avr3a/Avr5 and Avr6/Avr4, turned out to be different alleles of the same gene (Dong et al. 2011; Dou et al. 2010). In the case of Avr1a, deletion of two out of four nearly identical copies of the gene have been found to cause virulence. Similarly, some P. sojae strains have as many as four paralogs of Avr3a, and some have only one (Qutob et al. 2009). Such high levels of similarity, tandem duplications and variation in the number of copies make it very difficult to develop sequence-based diagnostic markers.

[0006] Avirulence (Avr) genes are mostly located in highly dynamic genome areas containing duplications and repetitive sequences that are prone to chromosomal rearrangements. High levels of sequence variation, duplications, interdependency of Avr genes and rapid evolution complicate the task of characterizing newly evolved strains. Efficient tools to rapidly and accurately identify virulence features in P. sojae have become essential to prevent disease outbreaks. The objective is to identify variation signatures (haplotypes) associated with virulence factors. Haplotypes representing the allelic variation of a given gene have also been found to be tightly linked with the copy number variation and expression of the same gene (Kadam et al. 2016; Verta, Landry, and MacKay 2016; Zeng, Zhou, and Huang 2017).

[0007] Precise phenotyping of the interactions between pathotypes and differentials remains an essential component to assess the functionality of either Avror Rps genes. For this purpose, several phenotyping methods have been developed and proposed (Haas and Buzzell 1976; Kilen, Hartwig, and Keeling 1974; Ward et al. 1979; Morrison and Thorne 1978; Wagner and Wilkinson 1992; Pazdernik et al. 2007). Over the years, the hypocotyl inoculation test has become the standard test, particularly because of its ease of use (Dorrance, Jia, and Abney 2004). However, as convenient as the hypocotyl inoculation method is, it has limitations leading to the identification of false positives or negatives (Schmitthenner, Hobe, and Bhat 1994), which can bring confusion about the presence and/or functionality of Avr genes in P. sojae isolates. Recently, Lebreton et al. (2018) proposed the use of a simplified hydroponic assay as a way to more robustly characterize the phenotypes by inoculating the root system of soybean plants directly with zoospores of P. sojae.

[0008] There is therefore a need for further development of methods and tools for plant pathogen assessment.

[0009] The present description refers to a number of documents, the content of which is herein incorporated by reference in their entirety.

### SUMMARY OF THE INVENTION

[0010] The present invention relates to plant pathogen assessment and management, such as the assessment and management of Phytophthora pathogens.

[0011] In various aspects and embodiments, the present disclosure provides the following items:
[0012] 1. A method for assessing whether a Phytophthora pathogen is virulent or avirulent, comprising:

[0013] (a) determining, in a sample comprising Phytophthora nucleic acid, the presence or absence of one or more variations in one or more Avr genes or a flanking region thereof in the Phytophthora nucleic acid; and

[0014] (b) determining whether the Phytophthora pathogen is virulent or avirulent on the basis of the presence or absence of the one or more variations.
[0015] 2. The method of item 1, wherein the one or more Avr genes are one or more of Avr1a, Avr1b, Avr1c, Avr1d, Avr1k, Avr3a and Avr6.
[0016] 3. The method of item 1 or 2, wherein the one or more variations are each independently a substitution, deletion or insertion of one or more nucleotides.
[0017] 4. The method of item 3, wherein the one or more variations are a single nucleotide polymorphism (SNP).
[0018] 5. The method of any one of items 1 to 4, wherein the variations are one or more indels and/or SNPs corresponding to one or more indels and/or SNPs set forth in FIGS. 1 (Avr1a), 3 (Avr1b), 5 (Avr1c), 7 (Avr1d), 9 (Avr1k), 11 (Avr3a) and/or 12 (Avr6), 16-23 and/or Table 4 and/or 5.
[0019] 6. The method of any one of items 1 to 5, wherein the presence or absence of the one or more variations is determined via assessment of a different region of the Phytophthora nucleic acid that is in linkage disequilibrium with the one or more variations.
[0020] 7. The method of any one of items 1 to 6, wherein the presence or absence of the one or more variations is determined using an amplification method.
[0021] 8. The method of item 7, wherein the amplification method is polymerase chain reaction (PCR).
[0022] 9. The method of item 7 or 8, wherein the amplification reaction is carried out using primer sequences comprised within the sequences set forth in one or more of FIGS. 16-22.
[0023] 10. The method of any one of items 7 to 9, wherein the amplification is carried out as one or more multiplex amplifications for determination of the presence or absence of two or more variations in each amplification reaction.
[0024] 11. The method of item 10, wherein the one or more multiplex amplifications comprises or consists of two multiplex amplifications.
[0025] 12. The method of item 11, wherein the two multiplex amplifications comprise (a) a first multiplex amplification to determine the presence or absence of one or more indels and/or SNPs corresponding to one or more indels and/or SNPs in Avr1a shown in FIGS. 1, 16 and/or 23, and/or Table 4 and/or 5 one or more indels and/or SNPs corresponding to one or more indels and/or SNPs in Avr1b, Avr1d, Avr1k, Avr3a and Avr6 shown in FIGS. 3, 7, 9, 11, 13 and/or 17 and 19-23, and/or Table 4 and/or 5; and (b) a second amplification to determine the presence or absence of one or more indels and/or SNPs corresponding to one or more indels and/or SNPs in Avr1c shown in FIGS. 5, 18, and/or 23, and/or Table 4 and/or 5.
[0026] 13. The method of any one of items 7 to 12, wherein the amplification is performed using one or more primer pairs set forth in Table 2, or functional equivalents thereof that are targeted to a sequence up to 200 nucleotides upstream or downstream from the regions targeted by the one or more primers set forth in Table 2.
[0027] 14. The method of item 13, wherein the amplification is performed using one or more primer pairs targeted to a sequence up to 150 nucleotides upstream or downstream from the regions targeted by the one or more primers set forth in Table 2.
[0028] 15. The method of item 13 or 14, wherein the amplification is performed using one or more primer pairs targeted to a sequence up to 100 nucleotides upstream or downstream from the regions targeted by the one or more primers set forth in Table 2.
[0029] 16. The method of any one of items 13 to 15, wherein the amplification is performed using one or more primer pairs targeted to a sequence up to 50 nucleotides upstream or downstream from the regions targeted by the one or more primers set forth in Table 2.
[0030] 17. The method of any one of items 1 to 16, wherein the Phytophthora pathogen is Phytophthora sojae.
[0031] 18. A method for assessing risk of Phytophthora pathogen infection of a soybean plant:

[0032] (a) assessing, in a sample obtained from the plant, the soil, the water, the seeds, the air, or any culture containing one or several isolates of Phytophthora pathogen, whether the sample comprises a virulent or avirulent Phytophthora pathogen using the method of any one of items 1 to 17; and

[0033] (b) assessing the risk of Phytophthora pathogen infection of the soybean plant on the basis of the assessment made in (a), wherein the presence of a virulent Phytophthora pathogen in the sample is indicative of an elevated risk of Phytophthora pathogen infection of the soybean plant.
[0034] 19. The method of item 19, further comprising treating the plant with an antifungal agent if the risk of Phytophthora pathogen infection is elevated.
[0035] 20. A method for selecting a soybean cultivar for planting in an agricultural area, comprising:

[0036] (a) assessing, in a sample obtained from the plant, the soil, the water, the seeds, the air, or any culture containing one or several isolates of Phytophthora pathogen, whether the sample comprises a virulent or avirulent Phytophthora pathogen using the method of any one of items 1 to 17;

[0037] (b) if the sample comprises a virulent Phytophthora pathogen, selecting a soybean cultivar comprising one or more resistances (Rps) genes that confer resistance to the one or more Avr genes identified in the sample that confer virulence, for planting in the agricultural area.
[0038] 21. A collection, kit or package comprising one or more oligonucleotides for determining the presence or absence of one or more variations in one or more Avrgenes or a flanking region thereof in the nucleic acid of a Phytophthora pathogen.
[0039] 22. The collection, kit or package of item 21, wherein the one or more Avr genes are one or more of Avr1a, Avr1b, Avr1c, Avr1d, Avr1k, Avr3a and Avr6.
[0040] 23. The collection, kit or package of item 21 or 22, wherein the one or more variations are each independently a substitution, deletion or insertion of one or more nucleotides.
[0041] 24. The collection, kit or package of item 23, wherein the one or more variations are a single nucleotide polymorphism (SNP).
[0042] 25. The collection, kit or package of any one of items 21 to 24, wherein the variations are one or more indels and/or SNPs corresponding to one or more indels and/or SNPs set forth in FIGS. 1 (Avr1a), 3 (Avr1b), 5 (Avr1c), 7 (Avr1d), 9 (Avr1k), 11 (Avr3a) and/or 12 (Avr6), 16-23 and/or Table 4 and/or 5
[0043] 26. The collection, kit or package of any one of items 21 to 25, wherein the presence or absence of the one or more variations is determined via assessment of a different region of the Phytophthora nucleic acid that is in linkage disequilibrium with the one or more variations.
[0044] 27. The collection, kit or package of any one of items 21 to 26, wherein the presence or absence of the one or more variations is determined using an amplification method.
[0045] 28. The collection, kit or package of item 27, wherein the amplification method is polymerase chain reaction (PCR).
[0046] 29. The collection, kit or package of item 27 or 28, wherein the one ore more oligonucleotides comprise primer sequences comprised within the sequences set forth in one or more of FIGS. 16-22 for use in one or more amplification reactions.
[0047] 30. The collection, kit or package of any one of items 27 to 29, wherein the one or more oligonucleotides are for use in one or more multiplex amplifications for determination of the presence or absence of two or more variations in each amplification reaction.
[0048] 31. The collection, kit or package of item 30, wherein the one or more multiplex amplifications comprises or consists of two multiplex amplifications.
[0049] 32. The collection, kit or package of item 31, wherein the two multiplex amplifications comprise (a) a first multiplex amplification to determine the presence or absence of one or more indels and/or SNPs corresponding to one or more indels and/or SNPs in Avr1a shown in FIGS. 1, 16 and/or 23, and/or Table 4 and/or one or more indels and/or SNPs corresponding to one or more indels and/or SNPs in Avr1b, Avr1d, Avr1k, Avr3a and Avr6 shown in FIGS. 3, 7, 9, 11, 13 and/or 17 and 19-23, and/or Table 4 and/or 5; and (b) a second amplification to determine the presence or absence of one or more indels and/or SNPs corresponding to one or more indels and/or SNPs in Avr1c shown in FIGS. 5, 18, and/or 23, and/or Table 4 and/or 5.
[0050] 33. The collection, kit or package of any one of items 27 to 32, wherein the one or more oligonucleotides comprise one or more primer pairs set forth in Table 2, or functional equivalents thereof that are targeted to a sequence up to 200 nucleotides upstream or downstream from the regions targeted by the one or more primers set forth in Table 2.
[0051] 34. The collection, kit or package of item 33, wherein the one or more oligonucleotides comprise one or more primer pairs targeted to a sequence up to 150 nucleotides upstream or downstream from the regions targeted by the one or more primers set forth in Table 2.
[0052] 35. The collection, kit or package of item 33 or 34, wherein the one or more oligonucleotides comprise one or primer pairs targeted to a sequence up to 100 nucleotides upstream or downstream from the regions targeted by the one or more primers set forth in Table 2.
[0053] 36. The collection, kit or package of any one of items 33 to 35, wherein the one or more oligonucleotides comprise one or more primer pairs targeted to a sequence up to 50 nucleotides upstream or downstream from the regions targeted by the one or more primers set forth in Table 2.
[0054] 37. The collection, kit or package of any one of items 21 to 36, wherein the Phytophthora pathogen is Phytophthora sojae.
[0055] 38. The collection, kit or package of any one of items 21 to 36, wherein the one or more oligonucleotides are attached or bound to a solid support.

[0056] Other objects, advantages and features of the present invention will become more apparent upon reading of the following non-restrictive description of specific embodiments thereof, given by way of example only with reference to the accompanying drawings.

### BRIEF DESCRIPTION OF DRAWINGS

[0057] In the appended drawings:

[0058] FIG. 1: Structural and nucleotide diversity at the Avr1a locus among 31 isolates of Phytophthora sojae reveal distinct haplotypes associated with virulence phenotypes. a Variants in the vicinity of the P. sojae Avr1a gene. The yellow box represents the coding region of the gene. The orange box shows the location of the deletion. Asterisks (*) indicate approximate positions of the SNPs. Those SNPs are representative of a cluster of SNPs defining a haplotype. b Schematic graph of the position of the SNPs for each isolate, grouped by haplotypes. SNPs in gray background are different from the reference genome (isolate P6497). c Phenotypic response of the outliers (when the phenotype did not match the genotype based on the hypocotyl test) from the hydroponic assay. Responses showed here are representative of all isolates tested. *CNV of Avr1a gene for the reference genome (P6497) is based on data from Qutob et al. (Qutob et al. 2009).

[0059] FIG. 2: Agarose gel electrophoresis of the PCR reaction for Avr1a gene. The phenotype of avirulence (A) or virulence (V) on Rps1a for each selected isolate is indicated at the top of the gel. Primers were designed to get an amplification only when isolates are avirulent on Rps1a.

[0060] FIG. 3: Nucleotide diversity at the Avr1b locus among 31 isolates of Phytophthora sojae reveal distinct haplotypes associated with virulence phenotypes. a Variants within the coding region of the P. sojae Avr1b gene. Yellow box represents the coding region of the gene and gray bars, 5′ and 3′ UTR. Asterisks (*) indicate approximate positions of the SNPs and small indels. Those variants are representative of a cluster of variants defining a haplotype. b Schematic graph of the position of the SNPs for each isolate, grouped by haplotypes. Variants in gray background are different from the reference genome (isolate P6497). c Phenotypic response of the outliers (when the phenotype did not match the genotype based on the hypocotyl test) from the hydroponic assay. Responses showed here are representative of all isolates tested.

[0061] FIG. 4: Agarose gel electrophoresis of the PCR reaction for Avr1b gene. The phenotype of avirulence (A) or virulence (V) on Rps1b for each selected isolate is indicated at the top of the gel. Primers were designed to get an amplification only when isolates are avirulent on Rps1b.

[0062] FIG. 5: Structural and nucleotide diversity at the Avr1c locus among 31 isolates of Phytophthora sojae reveal distinct haplotypes associated with virulence phenotypes. a Variants within the coding region of the P. sojae Avr1c gene. Yellow box represents the coding region of the gene and gray bars, 5′ and 3′ UTR. Asterisks (*) indicate approximate positions of the SNPs. Those SNPs are representative of a cluster of SNPs defining a haplotype. b Schematic graph of the position of the SNPs for each isolate, grouped by haplotypes. SNPs in gray background are different from the reference genome (isolate P6497). c Phenotypic response of the outliers (when the phenotype did not match the genotype based on the hypocotyl test) from the hydroponic assay. Responses showed here are representative of all isolates tested.

[0063] FIG. 6: Agarose gel electrophoresis of the PCR reaction for Avr1c gene. The phenotype of avirulence (A) or virulence (V) on Rps1c for each selected isolate is indicated at the top of the gel. Primers were designed to get an amplification only when isolates are avirulent on Rps1c.

[0064] FIG. 7: Structural and nucleotide diversity at the Avr1d locus among 31 isolates of Phytophthora sojae reveal distinct haplotypes associated with virulence phenotypes. a Deletion in the vicinity of the P. sojae Avr1d locus. Yellow box represents exon and gray bars, 5′ and 3′ UTR. Orange boxes show the position of deletions in virulent isolates. b Schematic graph of the genotypes based on the deletion. Genotypes in gray background are different from the reference genome (isolate P6497). c Phenotypic response of the outliers (when the phenotype did not match the genotype based on the hypocotyl test) from the hydroponic assay. Responses showed here are representative of all isolates tested.

[0065] FIG. 8: Agarose gel electrophoresis of the PCR reaction for Avr1d gene. The phenotype of avirulence (A) or virulence (V) on Rps1d for each selected isolate is indicated at the top of the gel. Primers were designed to get an amplification only when isolates are avirulent on Rps1d.

[0066] FIG. 9: Nucleotide diversity at the Avr1k locus among 31 isolates of Phytophthora sojae reveal distinct haplotypes associated with virulence phenotypes. a Variants within the coding region of the Phytophthora sojae Avr1k gene. Yellow box represents the coding region of the gene and gray bars, 5′ and 3′ UTR. Asterisks (*) indicate approximate positions of the SNPs and small indel. Those variants are representative of a cluster of variants defining a haplotype. b Schematic graph of the position of the variants for each isolate, regrouped by haplotypes. Variants in gray background are different from the reference genome (isolate P6497). c Phenotypic response of the outliers (when the phenotype did not match the genotype based on the hypocotyl test) from the hydroponic assay. Responses showed here are representative of all isolates tested.

[0067] FIG. 10: Agarose gel electrophoresis of the PCR reaction for Avr1k gene. The phenotype of avirulence (A) or virulence (V) on Rps1k for each selected isolate is indicated at the top of the gel. Primers were designed to get an amplification only when isolates are avirulent on Rps1k.

[0068] FIG. 11: Structural and nucleotide diversity at the Avr3a locus among 31 isolates of Phytophthora sojae reveal distinct haplotypes associated with virulence phenotypes. a Variants in the coding region of the P. sojae Avr3a region. Yellow box represents the coding region of the gene and gray bars, 5′ and 3′ UTR. Asterisk (*) indicate approximate positions of the SNPs and small indel. Those variants are representative of a cluster of variants defining a haplotype. b Schematic graph of the position of the variants for each isolate, regrouped by haplotypes. Variants in gray background are different from the reference genome (isolate P6497). Phenotype results were confirmed by re-testing a number of isolates with the hydroponic assay)*CNV of Avr3a gene for the reference genome (P6497) is based on data from Qutob et al. (2009).

[0069] FIG. 12: Agarose gel electrophoresis of the PCR reaction for Avr3a gene. The phenotype of avirulence (A) or virulence (V) on Rps3a for each selected isolate is indicated at the top of the gel. Primers were designed to get an amplification only when isolates are avirulent on Rps3a.

[0070] FIG. 13: Structural and nucleotide diversity at the Avr6 locus among 31 isolates of Phytophthora sojae reveal distinct haplotypes associated with virulence phenotypes. a Variants in the upstream region of the P. sojae Avr6 gene. Yellow box represents exon and gray bars, 5′ and 3′ UTR. Asterisks (*) indicate approximate positions of the SNPs and small indel. b Schematic graph of the position of the variants for each isolate, regrouped by haplotypes. Variants in gray background are different from the reference genome (isolate P6497). c Phenotypic response of the outliers (when the phenotype did not match the genotype based on the hypocotyl test) from the hydroponic assay. Responses showed here are representative of all isolates tested.

[0071] FIG. 14: Agarose gel electrophoresis of the PCR reaction for Avr6 gene. The phenotype of avirulence (A) or virulence (V) on Rps6 for each selected isolate is indicated at the top of the gel. Primers were designed to get an amplification only when isolates are avirulent on Rps6.

[0072] FIG. 15: Gel images of multiplex PCR amplifications of discriminant regions associated with avirulence alleles for seven Avr genes in Phytophthora sojae. (A-B) Results obtained with 31 isolates with a known pathotype, as indicated at the bottom of the gel, for Avr1a, 1b, 1d, 1k, 3a and 6. Expected size of the amplicon for each Avr gene is indicated on the right. (C) Complementary gel of PCR amplification of discriminant region associated with the avirulence allele for Avr1c (right) along with results obtained for the 31 isolates (A=avirulent and V=virulent) where A or V indicates presence or absence of the amplicon, respectively. For each isolate, the pathotype should correspond to the absence of an amplicon for each corresponding gene.

[0073] FIG. 16: Alignment of sequences covering P. sojae Avr1a gene and associated regions, including SNPs and/or indels associated with Avr1a described herein (16A-16E: refgenome, consensus: SEQ ID NO: 1, haplotypes A-E: SEQ ID NOs: 2-6; 16F-16J: refgenome: SEQ ID NO: 7, haplotypes A-E: SEQ ID NOs: 8-11, consensus SEQ ID NO: 12; 16K-16N: refgenome: SEQ ID NO: 13, haplotypes A-E: SEQ ID NOs: 14-18, consensus SEQ ID NO: 19; 16O-16S: refgenome, consensus: SEQ ID NO: 20, haplotypes A-E: SEQ ID NOs: 21-25; 16T-16X: refgenome, consensus: SEQ ID NO: 26, haplotypes A-E: SEQ ID NOs: 27-31; 16Y-16CC: refgenome: SEQ ID NO: 32, haplotypes A-E: SEQ ID NOs: 33-37, consensus SEQ ID NO: 38; 16DD-16HH: refgenome, consensus: SEQ ID NO: 39, haplotypes A-E: SEQ ID NOs: 40-44).

[0074] FIG. 17: Alignment of sequences covering P. sojae Avr1b gene and associated regions, including SNPs and/or indels associated with Avr1b described herein (refgenome: SEQ ID NO: 45, haplotypes A-C: SEQ ID NOs: 46-48, consensus SEQ ID NO: 49).

[0075] FIG. 18: Alignment of sequences covering P. sojae Avr1c gene and associated regions, including SNPs and/or indels associated with Avr1c described herein (refgenome: SEQ ID NO: 50, haplotypes A-E: SEQ ID NOs: 51-55, consensus SEQ ID NO: 56).

[0076] FIG. 19: Alignment of sequences covering P. sojae Avr1d gene and associated regions, including SNPs and/or indels associated with Avr1d described herein (refgenome, consensus: SEQ ID NO: 57, haplotypes A-C: SEQ ID NOs: 58-60).

[0077] FIG. 20: Alignment of sequences covering P. sojae Avr1k gene and associated regions, including SNPs and/or indels associated with Avr1k described herein (refgenome: SEQ ID NO: 61, haplotypes A-C: SEQ ID NOs: 62-64).

[0078] FIG. 21: Alignment of sequences covering P. sojae Avr3a gene and associated regions, including SNPs and/or indels associated with Avr3a described herein (refgenome, consensus: SEQ ID NO: 65, haplotypes A-B: SEQ ID NOs: 66-67).

[0079] FIG. 22: Alignment of sequences covering P. sojae Avr6 gene and associated regions, including SNPs and/or indels associated with Avr6 described herein (refgenome, consensus: SEQ ID NO: 68, haplotypes A-B: SEQ ID NOs: 69-70).

[0080] FIG. 23: Discriminant haplotypes associated with distinct phenotypes in seven avirulence genes of Phytophthora sojae used to build discriminant primers. (A) Avr1a, (B) Avr1b, (C) Avr1c, (D) Avr1d, (E) Avr1k, (F) Avr3a, and (G) Avr6. A=avirulent and V=virulent.

[0081] FIG. 24: Comparison of molecular and phenotyping assays to determine the pathotypes of Phytophthora sojae isolates. (A) Gel image of multiplex PCR amplifications of discriminant regions associated with avirulence alleles for seven Avr genes in P. sojae isolate 2012-82. Presence of amplicons for Avr1b, 1d and 1k predicts a pathotype 1a, 1c, 3a and 6. (B) Phenotyping results for isolate 2012-82 indicates a compatible interaction with Harosoy (no Rps), Rps1a, Rps1c, Rps3a and Rps6 and an incompatible interaction with Rps1b, Rps1d and Rps1k thereby assessing a pathotype 1a, 1c, 3a and 6, similar to the molecular assay. (C) Gel image of multiplex PCR amplifications of discriminant regions associated with avirulence alleles for seven Avr genes in P. sojae isolate 2012-156. Presence of amplicons for Avr1b, 1k, 3a, 6 and all three amplicons for Avr1a predicts a pathotype 1c and 1d. (D) Phenotyping results for isolate 2012-156 indicates a compatible interaction with Harosoy (no Rps), Rps1c, Rps1d and Rps3a and an incompatible interaction with Rps1a, Rps1b, Rps1k and Rps6 thereby assessing a pathotype 1c, 1d, and 3a, with 3a being the only interaction at odds with the molecular assay.

### DISCLOSURE OF INVENTION

[0082] In the studies described herein, a diverse set of 31 P. sojae isolates representing the range of pathotypes commonly observed in soybean fields were sequenced using whole genome sequencing (WGS). To understand the evolution and genetic constitution of P. sojae strains, haplotype analyses using the WGS data were performed for the seven most important Avr genes found in P. sojae populations: 1a, 1b, 1c, 1d, 1k, 3a, 6. The data described herein provides new insights into the complexity of Avr genes and their associated functionality and reveal that their genomic signatures can be used as accurate predictors of phenotypes for interaction with Rps genes in soybean. In embodiments, based on these genomic signatures, a multiplex PCR test has been developed that allows to characterize precisely the virulence profile of any isolate of P. sojae, overcoming the limitation of currently used phenotyping methods. This test will for example have useful applications for soybean growers and breeders by allowing the selection and deployment of Rps genes in soybean germplasm that allow a specific resistance against the virulence profiles of P. sojae present in a given field or given region. Considering that P. sojae can cause annual losses of $1-2 billion dollars worldwide (Tyler, 2007), the test will potentially result in significant loss reductions for soybean growers by preventing infection against virulent P. sojae isolates.

### Definitions

[0083] In order to provide clear and consistent understanding of the terms in the instant application, the following definitions are provided.

[0084] Headings, and other identifiers, e.g., (a), (b), (i), (ii), etc., are presented merely for ease of reading the specification and claims. The use of headings or other identifiers in the specification or claims does not necessarily require the steps or elements be performed in alphabetical or numerical order or the order in which they are presented. All methods described herein can be performed in any suitable order unless otherwise indicated herein or otherwise clearly contradicted by context.

[0085] In the present description, a number of terms are extensively utilized. In order to provide a clear and consistent understanding of the specification and claims, including the scope to be given such terms, the following definitions are provided.

[0086] Nucleotide sequences are presented herein by single strand, in the 5′ to 3′ direction, from left to right, using the one-letter nucleotide symbols as commonly used in the art and in accordance with the recommendations of the IUPAC IUB Biochemical Nomenclature Commission. An “isolated nucleic acid molecule”, as is generally understood and used herein, refers to a polymer of nucleotides, and includes, but should not limited to DNA and RNA. The “isolated” nucleic acid molecule is not in its natural in vivo state, obtained by cloning or chemically synthesized. By “isolated” it is meant that a sample containing a target nucleic acid is taken from its natural milieu, but the term does not connote any degree of purification.

[0087] The use of the word “a” or “an” when used in conjunction with the term “comprising” in the claims and/or the specification may mean “one” but it is also consistent with the meaning of “one or more”, “at least one”, and “one or more than one”.

[0088] As used in the specification and claims, the words “comprising” (and any form of comprising, such as “comprise” and “comprises”), “having” (and any form of having, such as “have” and “has”), “including” (and any form of including, such as “includes” and “include”) or “containing” (and any form of containing, such as “contains” and “contain”) are inclusive or open-ended and do not exclude additional, un-recited elements or method steps.

[0089] Throughout this application, the term “about” is used to indicate that a value includes the standard deviation of error for the device or method being employed to determine the value. In general, the terminology “about” is meant to designate a possible variation of up to 10%. Therefore, a variation of 1, 2, 3, 4, 5, 6, 7, 8, 9 and 10% of a value is included in the term “about”.

[0090] The term “DNA” or “RNA” molecule or sequence (as well as sometimes the term “oligonucleotide”) refers to a molecule comprised generally of the deoxyribonucleotides adenine (A), guanine (G), thymine (T) and/or cytosine (C). In “RNA”, T is replaced by uracil (U).

[0091] Recitation of ranges of values herein are merely intended to serve as a shorthand method of referring individually to each separate value falling within the range, unless otherwise indicated herein, and each separate value is incorporated into the specification as if it were individually recited herein. All subsets of values within the ranges are also incorporated into the specification as if they were individually recited herein. For example, for the recitation of numeric ranges herein, each intervening number there between with the same degree of precision is explicitly contemplated. For example, for the range of 18-20, the numbers 18, 19 and 20 are explicitly contemplated, and for the range 6.0-7.0, the number 6.0, 6.1, 6.2, 6.3, 6.4, 6.5, 6.6, 6.7, 6.8, 6.9, and 7.0 are explicitly contemplated.

[0092] The use of any and all examples, or exemplary language (e.g., “such as”) provided herein, is intended merely to better illustrate the invention and does not pose a limitation on the scope of the invention unless otherwise claimed.

[0093] Any and all combinations and sub-combinations of the embodiments and features disclosed herein are encompassed by the present invention.

[0094] Unless otherwise defined herein, scientific and technical terms used in connection with the present disclosure shall have the meanings that are commonly understood by those of ordinary skill in the art. For example, any nomenclatures used in connection with, and techniques of, cell and tissue culture, molecular biology, immunology, microbiology, genetics and protein and nucleic acid chemistry and hybridization described herein are those that are well known and commonly used in the art. The meaning and scope of the terms should be clear; in the event however of any latent ambiguity, definitions provided herein take precedent over any dictionary or extrinsic definition. Further, unless otherwise required by context, singular terms shall include pluralities and plural terms shall include the singular.

[0095] Practice of the methods, as well as preparation and use of the products and compositions disclosed herein employ, unless otherwise indicated, conventional techniques in molecular biology, biochemistry, chromatin structure and analysis, computational chemistry, cell culture, recombinant DNA and related fields as are within the skill of the art. These techniques are fully explained in the literature. See, for example, Sambrook et al. MOLECULAR CLONING: A LABORATORY MANUAL, Second edition, Cold Spring Harbor Laboratory Press, 1989 and Third edition, 2001; Ausubel et al., CURRENT PROTOCOLS IN MOLECULAR BIOLOGY, John Wiley & Sons, New York, 1987 and periodic updates; the series METHODS IN ENZYMOLOGY, Academic Press, San Diego; Wolffe, CHROMATIN STRUCTURE AND FUNCTION, Third edition, Academic Press, San Diego, 1998; METHODS IN ENZYMOLOGY, Vol. 304, “Chromatin” (P. M. Wassarman and A. P. Wolffe, eds.), Academic Press, San Diego, 1999; and METHODS IN MOLECULAR BIOLOGY, Vol. 119, “Chromatin Protocols” (P. B. Becker, ed.) Humana Press, Totowa, 1999.

[0096] As used herein, “polynucleotide” or “nucleic acid molecule” refers to a polymer of nucleotides and includes DNA (e.g., genomic DNA, cDNA), RNA molecules (e.g., mRNA), and chimeras thereof. The nucleic acid molecule can be obtained by cloning techniques or synthesized. DNA can be double-stranded or single-stranded (coding strand or non-coding strand [antisense]). Conventional deoxyribonucleic acid (DNA) and ribonucleic acid (RNA) are included in the terms “nucleic acid molecule” and “polynucleotide” as are analogs thereof (e.g., generated using nucleotide analogs, e.g., inosine or phosphorothioate nucleotides). Such nucleotide analogs can be used, for example, to prepare polynucleotides that have altered base-pairing abilities or increased resistance to nucleases. A nucleic acid backbone may comprise a variety of linkages known in the art, including one or more of sugar-phosphodiester linkages, peptide-nucleic acid bonds (referred to as “peptide nucleic acids” (PNA); Hydig-Hielsen et al., PCT Intl Pub. No. WO 95/32305), phosphorothioate linkages, methylphosphonate linkages or combinations thereof. Sugar moieties of the nucleic acid may be ribose or deoxyribose, or similar compounds having known substitutions, e.g., 2′ methoxy substitutions (containing a 2′-O-methylribofuranosyl moiety; see PCT No. WO 98/02582) and/or 2′ halide substitutions. Nitrogenous bases may be conventional bases (A, G, C, T, U), known analogs thereof (e.g., inosine or others; see “The Biochemistry of the Nucleic Acids 5-36”, Adams et al., ed., 11th ed., 1992), or known derivatives of purine or pyrimidine bases (see, Cook, PCT Intl Pub. No. WO 93/13121) or “abasic” residues in which the backbone includes no nitrogenous base for one or more residues (Arnold et al., U.S. Pat. No. 5,585,481). A nucleic acid may comprise only conventional sugars, bases and linkages, as found in RNA and DNA, or may include both conventional components and substitutions (e.g., conventional bases linked via a methoxy backbone, or a nucleic acid including conventional bases and one or more base analogs).

[0097] The terms “nucleic acid,” “polynucleotide,” and “oligonucleotide” are used interchangeably and refer to a deoxyribonucleotide or ribonucleotide polymer, in linear or circular conformation, and in either single- or double-stranded form. For the purposes of the present disclosure, these terms are not to be construed as limiting with respect to the length of a polymer. The terms can encompass known analogues of natural nucleotides, as well as nucleotides that are modified in the base, sugar and/or phosphate moieties (e.g., phosphorothioate backbones). In general, an analogue of a particular nucleotide has the same base-pairing specificity; i.e., an analogue of A will base-pair with T.

[0098] As used herein, the terms “gene” and “recombinant gene” refer to nucleic acid molecules which may be isolated from chromosomal DNA, and very often include an open reading frame encoding a protein. A gene may include coding sequences, non-coding sequences, introns and regulatory sequences, as well known.

[0099] The terms “polypeptide,” “peptide” and “protein” are used interchangeably to refer to a polymer of amino acid residues. The term also applies to amino acid polymers in which one or more amino acids are chemical analogues or modified derivatives of corresponding naturally-occurring amino acids.

[0100] As used herein, the term “non-conservative mutation” or “non-conservative substitution” in the context of polypeptides refers to a mutation in a polypeptide that changes an amino acid to a different amino acid with different biochemical properties (i.e., charge, hydrophobicity and/or size). Although there are many ways to classify amino acids, they are often sorted into six main groups on the basis of their structure and the general chemical characteristics of their R groups. (i) Aliphatic (Glycine, Alanine, Valine, Leucine, Isoleucine); (ii) Hydroxyl or Sulfur/Selenium-containing (also known as polar amino acids) (Serine, Cysteine, Selenocysteine, Threonine, Methionine); (iii) Cyclic (Proline); (iv) Aromatic (Phenylalanine, Tyrosine, Tryptophan); (v) Basic (Histidine, Lysine, Arginine) and (vi) Acidic and their Amide (Aspartate, Glutamate, Asparagine, Glutamine). Thus, a non-conservative substitution includes one that changes an amino acid of one group with another amino acid of another group (e.g., an aliphatic amino acid for a basic, a cyclic, an aromatic or a polar amino acid; a basic amino acid for an acidic amino acid, a negatively charged amino acid (aspartic acid or glutamic acid) for a positively charged amino acid (lysine, arginine or histidine) etc.

[0101] Conversely, a “conservative substitution” or “conservative mutations” in the context of polypeptides are mutations that change an amino acid to a different amino acid with similar biochemical properties (e.g. charge, hydrophobicity and size). For example, a leucine and isoleucine are both aliphatic, branched hydrophobes. Similarly, aspartic acid and glutamic acid are both small, negatively charged residues. Therefore, changing a leucine for an isoleucine (or vice versa) or changing an aspartic acid for a glutamic acid (or vice versa) are examples of conservative substitutions.

[0102] “Coding sequence” or “encoding nucleic acid” as used herein means the nucleic acids (RNA or DNA molecule) that comprise a nucleotide sequence which encodes a protein. The coding sequence can further include initiation and termination signals operably linked to regulatory elements including a promoter and polyadenylation signal capable of directing expression in the cells of an individual or mammal to which the nucleic acid is administered. The coding sequence may be codon optimized, e.g. for use in eukaryotic, mammalian and/or human cells.

[0103] The term “variant” refers herein to a nucleic acid or polypeptide, which differs from a corresponding reference sequence by virtue of a mutation or modification, including an insertion, substitution, or deletion of one or more nucleotides or amino acids, as compared to its corresponding reference molecule. In an embodiment, the reference sequence is Phytophthora sojae reference genome P6497 (http://protists.ensembl.org/Phytophthora_sojae/Info/Index). Insertions and deletions are commonly collectively referred to as “indels”. In embodiments, the mutation or modification is a single nucleotide polymorphism (SNP) or an indel.

[0104] A “single nucleotide polymorphism” or “SNP” refers to a specific position in a sequence (e.g. in a genome) where there is a substitution of a nucleotide relative to a reference sequence. In embodiments the SNP is located in a coding region of a gene, in further embodiments the SNP is located in a noncoding region of a gene or in an intergenic region. In embodiments, the SNPs of the invention comprise one or more SNPs described herein, such as one or more SNPs corresponding to one or more SNPs set forth in FIGS. 1 (Avr1a), 3 (Avr1b), 5 (Avr1c), 8 (Avr1d), 10 (Avr1k), 12 (Avr3a), 14 (Avr6), 16-23, and/or Table 4 and/or 5. In embodiments, multiple SNPs may be determined simultaneously while in other embodiments SNPs may be determined separately.

[0105] In some embodiments, one or more SNPs or indels described herein may be detected or determined via the detection of a different region or SNP that is in linkage disequilibrium with the one or more SNPs or indels described herein found to be associated with virulence or avirulence of a Phytophthora pathogen. “Linkage disequilibrium” as used herein refers to the non-random association of alleles at different loci, e.g. two SNPs. Methods for measuring linkage disequilibrium are known in the art. Two such regions, e.g. SNPs, are in linkage disequilibrium if they are inherited together, and in such a case their presence is correlated with a relatively high degree of certainty.

[0106] Determining genotype, e.g. a SNP or indel, may comprise direct genotyping, e.g. by determining the identity of the nucleotide of each allele at the locus of SNP or indel, and/or indirect genotyping, e.g. by determining the identity of each allele at one or more loci that are in linkage disequilibrium with the SNP or indel in question and which allow inference of the identity of each allele at the locus of SNP in question with a substantial degree of confidence, in embodiments with a with a probability of at least 85%, 90%, 95% or 99% certainty.

[0107] In embodiments, a SNP or indel is detected through an amplification method, e.g. PCR amplification, or by nucleotide sequencing of the region comprising the SNP or indel. In embodiments a SNP or indel is detected using a probe specific for the SNP or indel, in embodiments via PCR amplification in the presence of the probe specific for the SNP or indel.

[0108] In embodiments SNPs or indels described herein may be detected using a DNA microarray. Such microarrays comprise oligonucleotides or probes bound or attached to a solid support or substrate, such as a bead, chip, glass slide or membrane. The oligonucleotides or probes may be arrayed at discrete regions on the substrate, and in turn their arrangement or organization on the substrate facilitates identification of a SNP or indel via specific probe-target interactions.

[0109] In embodiments, detection of genetic variation such as a SNP or indel is via hybridization to specific sequences which recognize the mutant and reference alleles in a nucleic acid fragment of a test sample. In embodiments, the fragment has been amplified, e.g. by PCR, and in a further embodiment labelled with a detectable label, such as a fluorescent molecule. In embodiments, the amplification reaction may be carried out on the microarray itself.

[0110] A missense mutation is a nucleotide substitution that results in a codon that codes for a different amino acid. A nonsense mutation results in the introduction of a stop codon. A readthrough mutation results in a stop codon being exchanged for an amino acid codon. Missense, nonsense and readthrough mutations are types of non-synonymous substitutions, i.e. that result in a modification of the amino acid sequence of the encoded polypeptide. A synonymous substitution in a coding sequence is one that does not modify the encoded amino acid sequence. Synonymous substitutions may also occur in non-coding regions. In embodiments, a modification, alteration or mutation described herein is synonymous or non-synonymous. In further embodiments, a modification, alteration or mutation described herein is missense, nonsense or readthrough.

[0111] “Complement” or “complementary” as used herein refers to Watson-Crick (e.g., A-T/U and C-G) or Hoogsteen base pairing between nucleotides or nucleotide analogs of nucleic acid molecules. “Complementarity” refers to a property shared between two nucleic acid sequences, such that when they are aligned antiparallel to each other, the nucleotide bases at each position will be complementary.

[0112] Sequence Similarity

[0113] The terms “identity” and “percent identity” are used interchangeably herein. For the purpose of this invention, it is defined here that in order to determine the percent identity of two amino acid sequences or of two nucleic acid sequences, the sequences are aligned for optimal comparison purposes (e.g., gaps can be introduced in the sequence of a first amino acid or nucleic acid sequence for optimal alignment with a second amino or nucleic acid sequence). The amino acid residues or nucleotides at corresponding amino acid positions or nucleotide positions are then compared. When a position in the first sequence is occupied by the same amino acid residue or nucleotide as the corresponding position in the second sequence, then the molecules are identical at that position. The percent identity between the two sequences is a function of the number of identical positions shared by the sequences (i.e., % identity=number of identical positions/total number of positions (i.e., overlapping positions)×100). Preferably, the two sequences are the same length. Thus, in accordance with the present invention, the term “identical” or “percent identity” in the context of two or more nucleic acid or amino acid sequences, refers to two or more sequences or subsequences that are the same, or that have a specified percentage of amino acid residues or nucleotides that are the same (e.g., 60% or 65% identity, preferably, 70-95% identity, more preferably at least 95% identity), when compared and aligned for maximum correspondence over a window of comparison, or over a designated region as measured using a sequence comparison algorithm as known in the art, or by manual alignment and visual inspection. Sequences having, for example, 60% to 95% or greater sequence identity are considered to be substantially identical. Such a definition also applies to the complement of a test sequence. Preferably, the described identity exists over a region that is at least about 15 to 25 amino acids or nucleotides in length, more preferably, over a region that is about 50 to 100 amino acids or nucleotides in length. Those having skill in the art will know how to determine percent identity between/among sequences using, for example, algorithms such as those based on CLUSTALW computer program (Thompson Nucl. Acids Res. 2 (1994), 4673-4680) or FASTDB (Brutlag Comp. App. Biosci. 6 (1990), 237-245), as known in the art. Although the FASTDB algorithm typically does not consider internal non-matching deletions or additions in sequences, i.e., gaps, in its calculation, this can be corrected manually to avoid an overestimation of the % identity. CLUSTALW, however, does take sequence gaps into account in its identity calculations. Also available to those having skill in this art are the BLAST and BLAST 2.0 algorithms (Altschul Nucl. Acids Res. 25 (1977), 3389-3402). The BLASTN program for nucleic acid sequences uses as defaults a word length (W) of 11, an expectation (E) of 10, M=5, N=4, and a comparison of both strands. For amino acid sequences, the BLASTP program uses as defaults a wordlength (W) of 3, and an expectation (E) of 10. The BLOSUM62 scoring matrix (Henikoff, Proc. Natl. Acad. Sci. USA, 89, (1989), 10915) uses alignments (B) of 50, expectation (E) of 10, M=5, N=4, and a comparison of both strands. Moreover, the present invention also relates to nucleic acid molecules the sequence of which is degenerate in comparison with the sequence of an above-described hybridizing molecule. When used in accordance with the present invention the term “being degenerate as a result of the genetic code” means that due to the redundancy of the genetic code different nucleotide sequences code for the same amino acid. The present invention also relates to nucleic acid molecules which comprise one or more mutations or deletions, and to nucleic acid molecules which hybridize to one of the herein described nucleic acid molecules, which show (a) mutation(s) or (a) deletion(s). The skilled person will appreciate that all these different algorithms or programs will yield slightly different results but that the overall percentage identity of two sequences is not significantly altered when using different algorithms.

[0114] In a related manner, the terms “homology” or “percent homology”, refer to a similarity between two polypeptide sequences, but take into account changes between amino acids (whether conservative or not). As well known in the art, amino acids can be classified by charge, hydrophobicity, size, etc. It is also well known in the art that amino acid changes can be conservative (e.g., they do not significantly affect, or not at all, the function of the protein). A multitude of conservative changes are known in the art, Serine for threonine, isoleucine for leucine, arginine for lysine etc., Thus the term homology introduces evolutionistic notions (e.g., pressure from evolution to a retain function of essential or important regions of a sequence, while enabling a certain drift of less important regions).

[0115] The skilled person will be aware of the fact that several different computer programs are available to determine the homology between two sequences. For instance, a comparison of sequences and determination of percent identity between two sequences can be accomplished using a mathematical algorithm. In a preferred embodiment, the percent identity between two amino acid sequences is determined using the Needleman and Wunsch (J. Mol. Biol. (48): 444-453 (1970)) algorithm which has been incorporated into the GAP program in the Accelrys GCG software package (available at http://www.accelrys.com/products/gcg/), using either a BLOSUM62 matrix or a PAM250 matrix, and a gap weight of 16, 14, 12, 10, 8, 6, or 4 and a length weight of 1, 2, 3, 4, 5, or 6. The skilled person will appreciate that all these different parameters will yield slightly different results but that the overall percentage identity of two sequences is not significantly altered when using different algorithms.

[0116] In yet another embodiment, the percent identity between two nucleotide sequences is determined using the GAP program in the Accelrys GCG software package (available at http://www.accelrys.com/products/gcg/), using a NWSgapdna.CMP matrix and a gap weight of 40, 50, 60, 70, or 80 and a length weight of 1, 2, 3, 4, 5, or 6. In another embodiment, the percent identity two amino acid or nucleotide sequence is determined using the algorithm of E. Meyers and W. Miller (CABIOS, 4:11-17 (1989) which has been incorporated into the ALIGN program (version 2.0) (available at the ALIGN Query using sequence data of the Genestream server IGH Montpellier France http://vega.igh.cnrs.fr/bin/align-guess.cgi) using a PAM120 weight residue table, a gap length penalty of 12 and a gap penalty of 4.

[0117] The nucleic acid and protein sequences of the present invention can further be used as a “query sequence” to perform a search against public databases to, for example, identify other family members or related sequences. Such searches can be performed using the NBLAST and XBLAST programs (version 2.0) of Altschul et al., (1990) J. Mol. Biol. 215:403-10. BLAST nucleotide searches can be performed with the NBLAST program, score=100, wordlength=12 to obtain nucleotide sequences homologous to nucleic acid molecules of the invention. BLAST protein searches can be performed with the XBLAST program, score=50, wordlength=3 to obtain amino acid sequences homologous to protein molecules of the invention. To obtain gapped alignments for comparison purposes, Gapped BLAST can be utilized as described in Altschul et al., (1997) Nucleic Acids Res. 25(17): 3389-3402. When utilizing BLAST and Gapped BLAST programs, the default parameters of the respective programs (e.g., XBLAST and NBLAST) can be used. See the homepage of the National Center for Biotechnology Information at http://www.ncbi.nlm.nih.gov/.

[0118] As used herein, the expressions “corresponding to”, “corresponding to the positions”, and “at a position or positions corresponding to”, and grammatical variations thereof, refer to one or more nucleotide or amino acid positions that are determined to correspond to one another based on sequence and/or structural alignments with a specified reference gene sequence, coding sequence, or protein. For example, a position “corresponding to” an amino acid position of a given protein can be determined empirically by aligning the sequence of amino acids of that given protein with that of a polypeptide of interest that shares a level of sequence identity therewith. Corresponding positions can be determined by comparing and aligning sequences to maximize the number of matching nucleotides or residues, for example, such that identity between the sequences is greater than 95%, 96%>, 97%, 98% or 99% or more. Corresponding positions also can be based on structural alignments, for example by using computer simulated alignments of protein structure. Recitation that amino acids of a polypeptide correspond to amino acids in a disclosed sequence refers to amino acids identified upon alignment of the polypeptide with the disclosed sequence to maximize identity or homology (where conserved amino acids are aligned) using a standard alignment algorithm, such as the GAP algorithm. For example, Table 5 sets forth corresponding positions in SEQ ID NOs: 1-70 for certain SNPs and indels described herein.

[0119] By “sufficiently complementary” is meant a contiguous nucleic acid base sequence that is capable of hybridizing to another sequence by hydrogen bonding between a series of complementary bases. Complementary base sequences may be complementary at each position in sequence by using standard base pairing (e.g., G:C, A:T or A:U pairing) or may contain one or more residues (including abasic residues) that are not complementary by using standard base pairing, but which allow the entire sequence to specifically hybridize with another base sequence in appropriate hybridization conditions. Contiguous bases of an oligomer are preferably at least about 80% (81, 82, 83, 84, 85, 86, 87, 88, 89, 90, 91, 92, 93, 94, 95, 96, 97, 98, 99, 100%), more preferably at least about 90% complementary to the sequence to which the oligomer specifically hybridizes. Appropriate hybridization conditions are well known to those skilled in the art, can be predicted readily based on sequence composition and conditions, or can be determined empirically by using routine testing (see Sambrook et al., Molecular Cloning, A Laboratory Manual, 2^{nd} ed. (Cold Spring Harbor Laboratory Press, Cold Spring Harbor, N.Y., 1989) at §§ 1.90-1.91, 7.37-7.57, 9.47-9.51 and 11.47-11.57, particularly at §§ 9.50-9.51, 11.12-11.13, 11.45-11.47 and 11.55-11.57).

[0120] The present invention refers to a number of units or percentages that are often listed in sequences. For example, when referring to “at least 80%, at least 85%, at least 90% . . . ”, or “at least about 80%, at least about 85%, at least about 90% . . . ”, every single unit is not listed, for the sake of brevity. For example, some units (e.g., 81, 82, 83, 84, 85, . . . 91, 92% . . . ) may not have been specifically recited but are considered encompassed by the present invention. The non-listing of such specific units should thus be considered as within the scope of the present invention.

[0121] Nucleic acid sequences may be detected by using hybridization with a complementary sequence (e.g., oligonucleotide probes) (see U.S. Pat. No. 5,503,980 (Cantor), U.S. Pat. No. 5,202,231 (Drmanac et al.), U.S. Pat. No. 5,149,625 (Church et al.), U.S. Pat. No. 5,112,736 (Caldwell et al.), U.S. Pat. No. 5,068,176 (Vijg et al.), and U.S. Pat. No. 5,002,867 (Macevicz)). Hybridization detection methods may use an array of probes (e.g., on a DNA chip) to provide sequence information about the target nucleic acid which selectively hybridizes to an exactly complementary probe sequence in a set of four related probe sequences that differ one nucleotide (see U.S. Pat. Nos. 5,837,832 and 5,861,242 (Chee et al.)).

[0122] A detection step may use any of a variety of known methods to detect the presence of nucleic acid by hybridization to an oligonucleotide probe. The types of detection methods in which probes can be used include Southern blots (DNA detection), dot or slot blots (DNA, RNA), and Northern blots (RNA detection). Labeled proteins could also be used to detect a particular nucleic acid sequence to which it binds (e.g., protein detection by far western technology: Guichet et al., 1997, Nature 385(6616): 548-552; and Schwartz et al., 2001, EMBO 20(3): 510-519). Other detection methods include kits containing reagents of the present invention on a dipstick setup and the like. Of course, it might be preferable to use a detection method which is amenable to automation. A non-limiting example thereof includes a chip or other support comprising one or more (e.g., an array) of different probes.

[0123] A “label” refers to a molecular moiety or compound that can be detected or can lead to a detectable signal. A label is joined, directly or indirectly, for example to an oligonucleotide, a nucleic acid probe or the nucleic acid to be detected (e.g., an amplified sequence) or to a polypeptide to be detected. Direct labeling can occur through bonds or interactions that link the label to the polynucleotide or polypeptide (e.g., covalent bonds or non-covalent interactions), whereas indirect labeling can occur through the use of a “linker” or bridging moiety, such as additional nucleotides, amino acids or other chemical groups, which are either directly or indirectly labeled. Bridging moieties may amplify a detectable signal. Labels can include any detectable moiety (e.g., a radionuclide, ligand such as biotin or avidin, enzyme or enzyme substrate, reactive group, chromophore such as a dye or colored particle, luminescent compound including a bioluminescent, phosphorescent or chemiluminescent compound, and fluorescent compound).

[0124] “Amplification” refers to any in vitro procedure for obtaining multiple copies (“amplicons” or “amplification products”) of a target nucleic acid sequence or its complement or fragments thereof. In vitro amplification refers to production of an amplified nucleic acid that may contain less than the complete target region sequence or its complement. In vitro amplification methods include, e.g., transcription-mediated amplification, replicase-mediated amplification, polymerase chain reaction (PCR) amplification, ligase chain reaction (LCR) amplification and strand-displacement amplification (SDA including multiple strand-displacement amplification method (MSDA)). Replicase-mediated amplification uses self-replicating nucleic acid molecules, and a replicase such as QR-replicase (e.g., Kramer et al., U.S. Pat. No. 4,786,600). PCR amplification is well known and uses DNA polymerase, primers and thermal cycling to synthesize multiple copies of the two complementary strands of DNA or cDNA (e.g., Mullis et al., U.S. Pat. Nos. 4,683,195, 4,683,202, and 4,800,159). LCR amplification uses at least four separate oligonucleotides to amplify a target and its complementary strand by using multiple cycles of hybridization, ligation, and denaturation (e.g., EP Pat. App. Pub. No. 0 320 308). SDA is a method in which a primer contains a recognition site for a restriction endonuclease that permits the endonuclease to nick one strand of a hemimodified DNA duplex that includes the target sequence, followed by amplification in a series of primer extension and strand displacement steps (e.g., Walker et al., U.S. Pat. No. 5,422,252). Two other known strand-displacement amplification methods do not require endonuclease nicking (Dattagupta et al., U.S. Pat. Nos. 6,087,133 and 6,124,120 (MSDA)). Those skilled in the art will understand that the oligonucleotide primer sequences of the present invention may be readily used in any in vitro amplification method based on primer extension by a polymerase. (see generally Kwoh et al., 1990, Am. Biotechnol. Lab. 8:14 25 and (Kwoh et al., 1989, Proc. Natl. Acad. Sci. USA 86, 1173 1177; Lizardi et al., 1988, BioTechnology 6:1197 1202; Malek et al., 1994, Methods Mol. Biol., 28:253 260; and Sambrook et al., 2000, Molecular Cloning—A Laboratory Manual, Third Edition, CSH Laboratories). As commonly known in the art, the oligos are designed to bind to a complementary sequence under selected conditions.

[0125] As used herein, a “primer” defines an oligonucleotide which is capable of annealing to a target sequence, thereby creating a double stranded region which can serve as an initiation point for nucleic acid synthesis under suitable conditions. The primer's 5′ region may be non-complementary to the target nucleic acid sequence and include additional bases, such as a promoter sequence (which is referred to as a “promoter primer”). Those skilled in the art will appreciate that any oligomer that can function as a primer can be modified to include a 5′ promoter sequence, and thus function as a promoter primer. Similarly, any promoter primer can serve as a primer, independent of its functional promoter sequence. Size ranges for primers include those that are about 10 to about 50 nt long and contain at least about 10 contiguous bases, or even at least 12 contiguous bases that are complementary to a region of the target nucleic acid sequence (or a complementary strand thereof). The contiguous bases are at least 80%, or at least 90%, or completely complementary to the target sequence to which the amplification oligomer binds. An amplification oligomer may optionally include modified nucleotides or analogs, or additional nucleotides that participate in an amplification reaction but are not complementary to or contained in the target nucleic acid, or template sequence. It is understood that when referring to ranges for the length of an oligonucleotide, amplicon, or other nucleic acid, that the range is inclusive of all whole numbers (e.g., 19-25 contiguous nucleotides in length includes 19, 20, 21, 22, 23, 24 and 25). The terminology “amplification pair” or “primer pair” refers herein to a pair of oligonucleotides (oligos) of the present invention, which are selected to be used together in amplifying a selected nucleic acid sequence by one of a number of types of amplification processes.

[0126] In an embodiment, the amplification reaction is a primer-dependent nucleic acid amplification reaction. The amplification reaction is allowed to proceed for a duration (e.g., number of cycles) and under conditions that generate a sufficient amount of amplification product. Most conveniently, polymerase chain reaction (PCR) will be used, although the skilled person would be aware of other techniques.

[0127] Many variations of PCR have been developed, for instance Real Time PCR (also known as quantitative PCR, qPCR), hot-start PCR, competitive PCR, and so on, and these may all be employed where appropriate to the needs of the skilled person.

[0128] In one basic embodiment using a PCR based amplification, the oligonucleotide primers are contacted with a reaction mixture containing the target sequence and free nucleotides in a suitable buffer. Thermal cycling of the resulting mixture in the presence of a DNA polymerase results in amplification of the sequence between the primers.

[0129] Optimal performance of the PCR process is influenced by choice of temperature, time at temperature, and length of time between temperatures for each step in the cycle. A typical cycling profile for PCR amplification is (a) about 5 minutes of DNA melting (denaturation) at about 95° C.; (b) about 30 seconds of DNA melting (denaturation) at about 95° C.; (c) about 30 seconds of primer annealing at about 50-65° C.; (d) about 30 seconds of primer extension at about 68° C.-72° C., preferably 72° C.; and steps (b)-(d) are repeated as many times as necessary to obtain the desired level of amplification. A final primer extension step may also be performed. The final primer extension step may be performed at about 68° C.-72° C., preferably 72° C. In certain embodiments the annealing step is performed at 50-60° C., e.g. 50-58° C., 52-58° C., 54-58° C., 53-57° C., or 53-55° C. In other embodiments the annealing step is performed at about 55° C. (e.g. 55° C.±4° C., 55° C.±3° C., 55° C.±2° C. 55° C.±1° C. or 55° C.±0.5° C.). In other embodiments the annealing step is performed at 40-60° C., e.g. 45-55° C., 46-54° C., 47-53° C., 48-52° C., or 49-51° C. In other embodiments the annealing step is performed at about 50° C. (e.g. 50° C.±4° C., 50° C.±3° C., 50° C.±2° C. 50° C.±1° C. or 50° C.±0.5° C.). The annealing step of other amplification reactions may also be performed at any of these temperatures.

[0130] In embodiments, the primers may be used, each independently, at a concentration of about 0.05 μM—about 0.50 μM, in a further embodiment 0.05 μM—about 0.40 μM, in a further embodiment 0.05 μM—about 0.30 μM, in a further embodiment 0.05 μM—about 0.20 μM, in a further embodiment 0.05 μM—about 0.15 μM, in further embodiments about 0.05 μM, 0.075 μM, 0.10 μM, 0.125 μM, 0.15 μM, 0.175 μM, or about 0.20 μM.

[0131] The detection method of the present invention may be performed with any of the standard master mixes and enzymes available. For example, commercially available PCR mix may be used, such as the QUANTITEC® PCR Master Mix (QIAGEN®) or the MAXIMA® qPCR master mix (Thermo-Scientific®). Furthermore, any conventional PCR (qPCR) instrument/system may be used, such as for example the LightCycler@ systems (Roche), SLAN® Real-Time PCR Detection Systems (Daan Diagnostics® Ltd.), Bio-Rad® real-time PCR systems, and the like.

[0132] Modifications of the basic PCR method such as qPCR (Real-Time PCR) have been developed that can provide quantitative information on the template being amplified. Numerous approaches have been taken although the two most common techniques use double-stranded DNA binding fluorescent dyes or selective fluorescent reporter probes.

[0133] Double-stranded DNA-binding fluorescent dyes, for instance SYBR Green, associate with the amplification product as it is produced and when associated the dye fluoresces. Accordingly, by measuring fluorescence after every PCR cycle, the relative amount of amplification product can be monitored in real time. Through the use of internal standards and controls, this information can be translated into quantitative data on the amount of template at the start of the reaction.

[0134] The fluorescent reporter probes used in qPCR are sequence-specific oligonucleotides, typically RNA or DNA, that have a fluorescent reporter molecule at one end and a quencher molecule at the other (e.g., the reporter molecule is at the 5′ end and a quencher molecule at the 3′ end or vice versa). The probe is designed so that the reporter is quenched by the quencher. The probe is also designed to hybridize selectively to particular regions of complementary sequence which might be in the template. If these regions are between the annealed PCR primers the polymerase, if it has exonuclease activity, will degrade (depolymerise) the bound probe as it extends the nascent nucleic acid chain it is polymerizing. This will relieve the quenching and fluorescence will rise. Accordingly, by measuring fluorescence after every PCR cycle, the relative amount of amplification product can be monitored in real time. Through the use of internal standard and controls, this information can be translated into quantitative data.

[0135] The amplification product may be detected, and amounts of amplification product can be determined by any convenient means. A vast number of techniques are routinely employed as standard laboratory techniques and the literature has descriptions of more specialized approaches. At its most simple the amplification product may be detected by visual inspection of the reaction mixture at the end of the reaction or at a desired time point. Typically, the amplification product will be resolved with the aid of a label that may be preferentially bound to the amplification product. Typically, a dye substance, e.g. a colorimetric, chromomeric fluorescent or luminescent dye (for instance ethidium bromide or SYBR green) is used. In other embodiments a labelled oligonucleotide probe that preferentially binds the amplification product is used.

[0136] In an embodiment, the amplification reaction is a multiplex amplification reaction (e.g., multiplexed PCR). “Multiplexed FOR” means a PCR wherein multiple target sequences (or a single target sequence and one or more reference sequences) are simultaneously carried out in the same reaction mixture. Usually, distinct sets of primers are employed for each sequence being amplified. Typically, the number of target sequences in a multiplex PCR is in the range of from 2 to 10, or from 2 to 8, or more typically, from 3 to 6.

[0137] A “probe” is meant to include a nucleic acid oligomer that hybridizes specifically to a target sequence in a nucleic acid or its complement, under conditions that promote hybridization, thereby allowing detection of the target sequence or its amplified nucleic acid. Detection may either be direct (i.e., resulting from a probe hybridizing directly to the target or amplified sequence) or indirect (i.e., resulting from a probe hybridizing to an intermediate molecular structure that links the probe to the target or amplified sequence). A probe's “target” generally refers to a sequence within an amplified nucleic acid sequence (i.e., a subset of the amplified sequence) that hybridizes specifically to at least a portion of the probe sequence by standard hydrogen bonding or “base pairing.” Sequences that are “sufficiently complementary” allow stable hybridization of a probe sequence to a target sequence, even if the two sequences are not completely complementary. A probe may be labeled or unlabeled. A probe can be produced by molecular cloning of a specific DNA sequence or it can also be synthesized. In an embodiment, the probe defined herein is a hydrolysis probe (e.g., TaqMan® probe) and comprises a fluorophore and a quencher attached thereto.

[0138] In an aspect, the present invention relates to assessing whether a plant pathogen is virulent or avirulent. In an embodiment, the pathogen is an oomycete. In a further embodiment, the pathogen is of Phytophthora spp. (mostly pathogens of dicotyledons; produces mildew), e.g., Phytophthora sojae (soya bean root and stem rot), Phytophthora infestans (potato late blight; destruction of solanaceous crops such as tomato and potato). In an embodiment the pathogen is Phytophthora sojae (soya bean root and stem rot). In embodiments, the plants of interest include vegetables, oil-seed plants and leguminous plants. In an embodiment, the plant of interest is soybean (Glycine max).

[0139] The determination of whether the plant pathogen, e.g. a Phytophthora pathogen, is virulent or avirulent is performed on the basis of the determination of the pathotype of the pathogen, e.g., the presence or absence of one or more variations, e.g. one or more indels and/or SNPs corresponding to one or more indels and/or SNPs described herein, in one or more Avr genes or a flanking region thereof, which in embodiments may be determined by directly identifying the presence or absence of one or more SNPs or indels or by indirectly identifying the presence or absence of one or more SNPs or indels by virtue of the assessment of another region or loci that is in linkage disequilibrium with the one or more SNPs or indels. In embodiments, the one or more Avr genes are one or more of Avr1a, Avr1b, Avr1c, Avr1d, Avr1k, Avr3a and Avr6. In a further embodiment, the one or more Avr genes is one or more of Avr1a, Avr1b, Avr1c, Avr1d, Avr1k and Avr6. In an embodiment, the one or more Avr genes is not Avr3a.

[0140] In embodiments, the one or more variations are one or more indels and/or SNPs corresponding to one or more indels and/or SNPs set forth in FIGS. 1 (Avr1a), 3 (Avr1b), 5 (Avr1c), 7 (Avr1d), 9 (Avr1k), 11 (Avr3a), 13 (Avr6) and/or 16-23, Table 4 and/or Table 5, and one or more discriminant positions set forth in Table 2. In embodiments, any single SNP or indel may be used to assess virulence or avirulence. In embodiments, any combination of 2 or more, SNP(s) and/or indel(s) (SNP(s), indel(s) or combination(s) thereof, e.g., 2 or more SNPs, 2 or more indels, 1 SNP+1 indel, 1 SNP+2 or more indels, 2 or more SNPs+1 indel, 2 or more SNPs+2 or more indels) may be used to assess virulence or avirulence. In further embodiments, any combination of 3 or more, 4 or more, 5 or more, 6 or more, 7 or more, 8 or more, 9 or more, or 10 or more SNP(s) and/or indel(s) may be used to assess virulence or avirulence.

[0141] The presence of a virulent pathogen, e.g. a Phytophthora pathogen, is indicative of an elevated risk of infection of the plant of interest. In such a case, in a further aspect, the present invention also relates to methods of controlling pathogen infection.

[0142] In an embodiment such methods include treatment of the plant or the agricultural area (e.g., to the soil, plants or air thereof) thereof with an antipathogen agent. In an embodiment, the antipathogen agent is a fungicide, which counters infection and disease caused by fungi or fungus-like organisms (e.g. oomycete), by specifically inhibiting or killing the fungus or fungus-like organism causing the disease. Fungicides are applied most often as liquid, but also as dust, granules and gas. In the field, they are for example applied to (1) soil, either in-furrow at planting, after planting as a soil drench (e.g., drip irrigation), or as a directed spray around the base of the plant; (2) foliage and other aboveground parts of plants via spraying; (3) in gaseous form in the air in enclosed areas such as greenhouses and covered soil. Post-harvest, they may be applied to harvested produce for example via dipping or spraying. In embodiments, the fungicide is a phosphonate fungicide, which is effective for example against oomycetes. Numerous fungicides for various pathogens and associated plant diseases are well known in the art.

[0143] In a further embodiment, methods of controlling pathogen infection include selection of a plant that is resistant to the particular plant pathogen. For example, the development of stem and root rot caused by P. sojae is determined by the gene-for-gene relationship between resistance (Rps) genes in soybean and their matching avirulence (Avr) genes in the pathogen. Thus, in the case of the identification of a virulent pathogen, e.g. a Phytophthora pathogen, or an elevated or high risk of infection of such a pathogen, a cultivar (e.g. a soybean cultivar) may be selected for planting that comprises one or more resistance (Rps) genes that confer resistance to the one or more Avr genes identified in the pathogen, thereby conferring resistance thereto.

[0144] In embodiments, such plant pathogen risk assessments may be utilized for the development and provision of resistant cultivars and seeds for planting.

[0145] The present invention further provides a collection, kit or package comprising one or more reagents for the assessment of pathogen virulence, for example one or more oligonucleotides (e.g. primers, probes) for such a use. In an embodiment, the kit or package further comprises additional reagents for assessment of pathogen virulence (e.g. buffers, solutions, PCR reagents such as polymerase). In a further embodiment, the kit or package further comprises with instructions for use, such as for assessment of pathogen virulence. In embodiments, various reagents, e.g. oligonucleotides, may be attached or bound to a solid support.

[0146] Also provided is an isolated nucleotide comprising one or more SNPs or indels described herein, in a form that is non-naturally occurring.

### MODE(S) FOR CARRYING OUT THE INVENTION

[0147] The present invention is illustrated in further details by the following non-limiting examples.

### Example 1: Methods

[0148] Plant Material and Phytophthora sojae Isolates

[0149] All P. sojae isolates used in this study (including 31 isolates of Phytophthora sojae, representing 12 different pathotype profiles (races), shown e.g. in Table 1) were sampled across Ontario (Canada). Each isolate was characterized for its pathotype/virulence profile using the hypocotyl wound-inoculation technique (Xue et al. 2015) where a set of eight differential soybean lines were used, each containing a single resistance Rps gene (Rps1a, Rps1b, Rps1c, Rps1d, Rps1k, Rps3a, Rps6 and Rps7), and ‘Williams’ (rps) as a universal susceptible check.

TABLE 1
Races and associated pathotypes of Phytophthora sojae
isolates characterized in this study, as determined
by hypocotyl wounding inoculation (Xue et al. 2015).

| | Pathotype | Number of | Isolates |
|---|---|---|---|
| Race | profile | isolates | IDs |
| 1 | 7 | 2 | 1A, 1C |
| 3 | 1a, 7 | 3 | 3A, 3B, 3C |
| 4 | 1a, 1c, 7 | 3 | 4A, 4B, 4C |
| 5 | 1a, 1c, 6, 7 | 3 | 5A, 5B, 5C |
| 7 | 1a, 3a, 6, 7 | 3 | 7A, 7B, 7C |
| 8 | 1a, 1d, 6, 7 | 3 | 8A, 8B, 8C |
| 9 | 1a, 6, 7 | 3 | 9A, 9B, 9C |
| 22 | 1a, 1c, 3a, 6, 7 | 1 | 22 |
| 25 | 1a, 1b, 1c, 1k, 7 | 3 | 25B, 25C |
| 25 + 1d | 1a, 1b, 1c, 1d, 1k, 7 | 1 | 25D |
| 28 | 1a, 1b, 1k, 7 | 3 | 28A, 28B, 28C |
| 43 | 1a, 1c, 1d, 7 | 1 | 43 |
| 45 | 1a, 1b, 1c, 1k, 6, 7 | 3 | 45A, 45B, 45C |

[0150] The isolates were first subcultured on V8 agar medium (20% clarified V8) covered with wax paper to facilitate harvest of hyphae and spores. After one week, cultures were scraped off the paper with a scalpel and placed in 1.5-ml tubes with screw caps (OMNI International inc., Kennesaw, Gerorgia, United States). The tubes were then kept in the freezer at −80° C. for 2-3 hours, and lyophilized overnight. The lyophilized samples were crushed with an Omni Bead Ruptor 24 (OMNI International). Then, the DNA was extracted from the crushed samples using the E.Z.N.A Plant DNA kit (Norcross, Ga., United-States) following the manufacturer's protocol for dried samples with slight modifications.

[0151] DNA Extraction and Sequencing

[0152] DNA was extracted for each of the 31 isolates using the E.Z.N.A. Plant DNA Kit (Omega Bio-Tek Inc., Norcross, Ga., USA). The DNA quantity and quality was assessed using a NanoDrop ND-1000 spectrophotometer (NanoDrop technologies). Each sample was normalized to 10 ng/μL for sequencing library construction using the NEBNext Ultra II DNA Library Prep Kit for Illumina (New England BioLabs Inc, Ipswich, Massachusets, USA). Library quality was determined using the Agilent 2100 Bioanalyzer (Agilent Technologies). An average fragment size of approximately 650 bp was observed among all 31 individual samples. Paired-end, 250-bp sequencing was performed on an Illumina HiSeq 2500 (CHU, Québec, Canada).

[0153] Reads alignment to the reference genome Quality of the reads obtained from sequencing were checked using FastQC (Babraham Institute, Cambridge, UK). Reads were processed using Trimmomatic (Bolger et al. 2014) to remove adapter sequences and bases with a Phred score below 20 (using the Phred+33 quality score). Trimmed reads were aligned against the Phytophthora sojae reference genome V3.0 (Tyler et al. 2006) using the Burrows-Wheeler Transform Alignment (BWA) software package v0.7.13 (Li and Durbin 2009).

[0154] Presence/Absence Polymorphisms and Copy Number Variation

[0155] To detect loss of avirulence genes in some isolates from the reference genome (presence/absence polymorphisms), we calculated the breadth of coverage for each gene, corresponding to the percentage of nucleotides with at least one mapped read (lx coverage), as per Raffaele et al. (2010). If the value of the breadth of coverage was below 80%, the gene was considered to be absent. For detection of copy number variation (CNV), we compared the average depth of coverage for each locus in every isolate and normalized the counts using the mean coverage of the genic region in every isolate.

[0156] Variant Detection

[0157] Variant calling was done using the Genome Analysis Toolkit (GATK) (DePristo et al. 2011), a variant calling pipeline based on GATK's best practices. The resulting raw vcf file was quality filtered using the vcfR package (Knaus and Grünwald 2017). For haplotype visualization, a simple visual inspection was sufficient in most cases, but a custom script developed at Université Laval was used in other cases, based on a gene-centric haplotyping process that aims to select only markers in the vicinity of a gene that are found to be in strong linkage disequilibrium (LD) (Tardivel et al. 2014).

[0158] Virulence Screening Using the Hydroponic Assay

[0159] Whenever an isolate had a phenotype predicted by the hypocotyl assay (Xue et al. 2015) discordant from the other isolates within a given haplotype, this isolate was re-phenotyped using the hydroponic assay developed by Lebreton et al. (2018), in which zoospores are inoculated directly into the hydroponic nutrient solution. For this purpose, the isolate was tested against the appropriate differential line with three to six plants for every replicate together with a susceptible control cultivar not carrying the appropriate Rps gene, a resistant control cultivar and a number of control isolates. Phenotypic responses for resistance or susceptibility were recorded at 14 days post-inoculation.

[0160] Expression Analysis

[0161] Total RNA was extracted from seven-day-old P. sojae-infected soybean roots using the Trizol reagent followed by purification using the Qiagen RNeasy Mini kit (Valencia, Calif., USA). The RNA samples were treated with DNase I enzyme to remove any contaminating DNA. A total of 3 μg RNA from each sample were used to synthesize single-stranded cDNA using oligo-dT primed reverse transcription and Superscript 11 reverse transcriptase (Invitrogen™ Carlsbad, Calif., USA) following the manufacturer's protocol. Primers for the quantitative reverse transcription PCR (qPCR) analysis were designed using PrimerQuest tool and the intercalating dyes design option (Coralville, Iowa, USA). Four biological replications were used for the expression analysis. Expression analysis was carried out for Avr genes in both avirulent and virulent isolates using the iQ™ SYBR® Green Supermix (Bio-Rad, Hercules, Calif., USA) and a MIC qPCR thermocycler machine (Bio Molecular Systems, Upper Coomera, Queensland, Australia). The PCR profile consisted of an initial activation of 95° C. for 3 min, followed by 40 cycles of 95° C. for 15 s and 60° C. for 45 sec. After cycling, dissociation curve analysis (with an initial hold of 95° C. for 10 sec followed by a subsequent temperature increase from 55 to 95° C. at 0.5° C./s) was performed to confirm the absence of nonspecific amplification. Actin was used as a constitutively expressed reference transcript. Relative quantification analysis was performed using the MIC-qPCR software which uses the LinRegPCR method developed by Ruijter et al. (2009) and the Relative Expression Software Tool (REST) for statistical significance (Pfaff) et al. 2002).

[0162] Confirmation of Haplotype Variation Using Sanger Sequencing

[0163] The isolates were freshly grown in V8 agar media for seven days under controlled conditions followed by DNA extraction. Regions spanning the Avr genes were amplified using specific sets of primers. The PCR profile was initial denaturation at 98° C. for 30 sec followed by 35 cycles of denaturation at 98° C. for 10 sec, annealing at 60° C. for 30 sec and extension at 72° C. for 2 min, and the final extension at 72° C. for 10 min. The PCR products were purified using the QIAquick PCR purification kit (Qiagen, Valencia, Calif., USA) followed by sequencing on an Applied Biosystems sequencer (ABI 3730x1 DNA Analyze) located at the CHU, Quebec, Canada. The sequencing results were analyzed using the SeqMan program implemented in the DNASTAR Lasergene software (Madison, Wis., USA).

[0164] Sequence Variations and Allele-Specific Primer Design

[0165] For designing allele-specific primers, the discriminant variations in the sequences of the different Avr genes of 31 isolates were studied and identified based on the genomic sequences available in the NCBI SRA repository, under the bioproject PRJNA434589 as reported by Arsenault-Labrecque et al. (2018). In all cases, we sought to obtain amplicons only from the avirulent allele(s) and of different sizes such that primers could be used in a multiplex assay and the amplicons easily resolved via gel electrophoresis. Discriminant variations most convenient for marker development were selected to design the primer pairs for the seven Avr genes under study (Avr1a, 1b, 1c, 1d, 1k, 3a and 6). In cases where deletions were present, at least one primer was positioned in the deletion such that the avirulent allele (i.e. without the deletion) could be amplified. If only SNPs differentiated the virulent and avirulent alleles, primers were designed in such a way that these variant positions were located at the 3′ extremity to maximize the specificity of amplification. Regions with two or more SNPs were preferentially selected to increase the allelic specificity. The primers were then synthesized by Thermo-Fisher Scientific (Waltham, Mass., USA). The details of the nine pairs of primers are presented in Table 1.

[0166] Primer Design for Multiplex PCR

[0167] Primers were designed based on the different haplotypes from the seven avirulence genes (Avr1a, Avr1b, Avr1c, Avr1d, Avr1k, Avr3a and Avr6) of P. sojae, interacting with the seven resistance genes, respectively Rps1a, Rps1b, Rps1c, Rps1d, Rps1k, Rps3a and Rps6, of soybean. If an indel was present in the sequence of the avirulence gene, primers were designed in this indel to discriminate the avirulent isolates from the virulent ones. If no indel was present, at least two neighboring SNPs were used to design the primers to increase the specificity of the primers. DNA from the 31 Phytophthora sojae isolates was extracted and used to test the designed primers.

[0168] Each primer was first tested in an individual PCR reaction to validate its specificity. The PCR reaction was carried out with a reaction volume of 20 μl and each primer was diluted at a concentration of 0.25 μM. The One Taq NEB (New England Biolabs, Ipswich, Mass., USA) was used as an enzyme at 0.025 U/μl with 2 μl of DNA extracted from P. sojae at a concentration of 10 ng/μl, 5× One Taq Standard reaction Buffer (New England Biolabs, Ipswich, Mass., USA), 0.2 mM of dNTPs and 2.5% of DMSO. For each avirulence gene, P. sojae isolates avirulent and virulent to the corresponding Rps genes (see Table 1) were chosen to characterize the specificity of each primer. The PCR reaction conditions were as follows: an initial denaturation at 94° C. for 5 minutes, followed by 30 cycles of denaturation at 94° C. for 30 seconds, annealing at 60° C. for 30 seconds, elongation at 68° C. for 1 minute, and a final elongation at 68° C. for 5 minutes. The migration of the PCR samples was performed on 1.5% agarose gel with 1×TAE buffer, containing 2,5 μl/mL of SYBR safe DNA gel stain (Invitrogen, Carlsbad, Calif., USA). A ladder of 1-1000 kb was used. DNA fragment analysis was also performed using a QIAxcel Advanced System on a DNA high resolution cartridge, based on method OH500 with alignment markers of 15 and 3000 bp according to the manufacturer's instructions (Qiagen, Hilden, Germany). A PCR was performed on each of the 31 isolates of P. sojae with a known pathotype to validate that the presence of the expected amplicon was associated with an avirulent response.

[0169] Multiplex PCR Optimization

[0170] Once the specificity of each primer was validated, all the primers were tested together in a multiplex PCR, to check for compatibility of all the primers in a unique PCR reaction. Different parameters were tested to optimize the reaction. First of all, the concentration of each primer was adjusted according to the intensity of the bands to obtain clear bands for all the avirulence genes detected. The number of cycles for the reaction was increased from 30 to 40 cycles to obtain more distinct bands. Furthermore, a temperature gradient was tested to determine that the optimal temperature was 55° C. The dNTPs concentration was increased to 2.5 mM. The concentrations of the other PCR products remained the same. The final PCR products were analyzed by QIAxcel Advanced System (Qiagen, Hilden, Germany).

[0171] Following optimization of primer concentration, annealing temperature and dNTP concentration, primers were mixed together in a single PCR reaction to check their compatibility in a multiplex PCR. It was found that the primers amplifying the Avr1c gene were not compatible with the other primers since, when put together, primer dimers were formed. Attempts to design alternative sets of primers were unsuccessful, so it was decided that the primers for Avr1c would be used in a separate assay in parallel with the multiplex assay. The multiplex PCR therefore contains the following eight primer sets: Avr1a-indel, Avr1a-snp1, Avr1a-snp2, Avr1b, Avr1d, Avr1k, Avr3a and Avr6.

[0172] The optimal number of cycles for the reaction was 40 cycles. Furthermore, a temperature gradient revealed that the temperature allowing obtaining the darkest and most distinct bands was 55° C. for the multiplex PCR reaction and 60° C. for the uniplex PCR. The dNTP concentration chosen was 0.25 mM. The final PCR products were analyzed with the QIAxcel Advanced System (Qiagen, Hilden, Germany).

[0173] The PCR reactions were carried out in a reaction volume of 20 μl. Each primer was diluted at the optimal concentration detailed in Table 1. The One Taq NEB (New England Biolabs, Ipswich, Mass., Etats-Unis) was used at 0.025 U/μl with 2 μl of DNA at a concentration of 10 ng/μl, 5× One Taq Standard reaction buffer (New England Biolabs, Ipswich, Mass., USA), 0.25 mM of dNTPs and 2.5% of DMSO (Sigma, Saint-Louis, Mo., United States). The multiplex PCR conditions consisted in an initial denaturation at 94° C. for 5 min, followed by 40 cycles of denaturation at 94° C. for 30 sec, annealing at 55° C. for 30 sec, elongation at 68° C. for 1 min, and a final elongation at 68° C. for 5 min. For the uniplex PCR reaction (Avr1c), the conditions consisted in an initial denaturation at 94° C. for 5 min, followed by 30 cycles of denaturation at 94° C. for 30 sec, annealing at 60° C. for 30 sec, elongation at 68° C. for 1 min, and a final elongation at 68° C. for 5 min.

[0174] Detection Limits of the Multiplex PCR

[0175] To determine the lowest concentration of DNA at which the multiplex and the uniplex PCR worked, dilutions from 0.01 μg to 20 ng were tested with the two PCR conditions described above. It was determined that the PCR multiplex could detect a DNA concentration of up to 0.2 ng, while the primers tested individually could detect a DNA concentration of 0.2 ρg.

[0176] Specificity of the Molecular Tool and Phenotyping

[0177] Once the multiplex PCR conditions were optimized, the 31 isolates with known haplotypes, previously sequenced by Arsenault-Labrecque et al. (2018), were analysed to test the efficiency of the molecular tool. Subsequently, 15 uncharacterized isolates were both with the multiplex PCR and phenotyped using the hydroponic assay developed by Lebreton et al. (2018). For the assay, zoospores were inoculated into a hydroponic system containing a nutrient solution diluted in water. Seven differential soybean lines were grown in the hydroponic system with a susceptible control (cultivar Harosoy), and the virulence profile of the isolate tested was determined on the basis of which Rps genes resulted in immunity. Phenotypic responses (resistance or susceptibility) were recorded 14 days post inoculation. Phenotyping results were then compared to results obtained with the multiplex PCR assay.

[0178] Multiplex PCR Validation

[0179] Once the PCR conditions were optimized, the 31 isolates with known haplotypes (Table 1) were analysed to test the efficacy of the molecular tool. Subsequently, isolates with unknown haplotypes were analysed and the results were compared with the phenotyping results performed with the hydroponic essay (Lebreton et al., 2018).

### Example 2: Results

[0180] Sequencing and Mapping

[0181] A total of 852,950,094 reads were obtained from paired-end sequencing of the 31 P. sojae isolates on the Illumina HiSeq 2500 sequencer. The number of sorted raw sequence reads per isolate ranged from 15 to 52 M reads with an average of 27 M reads per isolate, with a mean Phred-score of 32.4. Reads were processed using Trimmomatic and the processed reads were mapped to the reference genome. For every isolate, more than 96% of the reads were accurately mapped to the reference genome and the mean depth of coverage was 68×.

[0182] Coverage, Distribution and Predicted Functional Impact of SNPs

[0183] The HaplotypeCaller pipeline from GATK retained 260,871 variants among the 31 isolates. Stringent filtering of the variants based on sequence depth and mapping quality using vcfR retained a total of 204,944 high-quality variants. Variant analysis with SnpEff tool (Cingolani et al. 2012) identified 172,143 single nucleotide polymorphisms (SNPs), 14,627 insertions and 18,174 small indels in the total number of variants. Variants in coding regions were categorized as synonymous and non-synonymous substitutions; 61.1% of the SNPs resulted in a codon that codes for a different amino acid (missense mutation; 59.5%) or the introduction of a stop codon (nonsense mutation: 1.6%), whereas the remaining 38.9% of the SNPs were considered to be synonymous mutations. Links among the seven Avr genes were then further investigated on the basis of haplotype analysis.

[0184] Haplotypes for Avr1a

[0185] For all 31 isolates, CNV was analyzed based on depth of coverage and, for Avr1a, it ranged between zero and three copies (FIG. 1b). Among isolates with zero copy, all were virulent on Rps1a. For the remaining isolates, no SNPs or indels were observed within the coding region of Avr1a (FIG. 1a). However, we observed SNPs flanking Avr1a that were in high LD (R² 0.7) and defined four distinct haplotypes (FIG. 1b). Additional variants were also found but did not offer a higher level of discrimination. All isolates sharing three of these (B, C and D) were virulent on Rps1a while among isolates with haplotype A, all but isolate 3A were incompatible based on the hypocotyl assay. After re-phenotyping this isolate with the hydroponic bioassay, it was characterized as being unable to infect the differential carrying Rps1a confirming that haplotype A was the only one associated with an incompatible interaction with Rps1a (FIG. 1c).

[0186] Based on these haplotypes, three discriminant primers were designed to get an amplification when isolates are avirulent to Rps1a. The first pair of primers is located within the Avr1a gene (PHYSOscaffold_7:2042431-2042664), allowing to first identify virulent isolates showing a complete deletion of the gene (haplotype E). The primer sequences are presented in Table 2. The product size obtained is 234 bp as shown in FIG. 2.

TABLE 2
Primer sequences for each avirulence gene and its product size following amplification

| | Amplicon | Product | | |
|---|---|---|---|---|
| Primers | position | size | Forward^{†} | Reverse^{†} |
| Avr1a-indel | Scaffold_7: | 234 | GAAAGTGGACGGATATTTTCAAC | CAAGGACGGACTGGTACAGA |
| | 2,042,431- | | (SEQ ID NO: 71) | (SEQ ID NO: 72) |
| | 2,042,664 | | | |
| Avr1a-snp1 | Scaffold_7: | 213 | CTTAGTGTGCACCAACAGCCA | ACCACACTTCACGGAGCATT |
| | 2,263,667- | | (SEQ ID NO: 73) | (SEQ ID NO: 74) |
| | 2,263,879 | | | |
| Avr1a-snp2 | Scaffold_7: | 278 | GCTTTTCATCCAACGCTCAT | AATGATTGGCGGCAGATC |
| | 1,799,519- | | (SEQ ID NO: 75) | (SEQ ID NO: 76) |
| | 1,799,796 | | | |
| Avr1b | Scaffold_6: | 403 | AAGGGGTACAGCCTGGATAAG | CTTGCGCTGTGAAGTGTCAT |
| | 3,146,464- | | (SEQ ID NO: 77) | (SEQ ID NO: 78) |
| | 3,146,866 | | | |
| Avr1c | Scaffold_7: | 802 | CGGCAGAAGTTCTGGAAGA | GCCTTCCTTTGTCAGATTCG |
| | 2,046,020- | | (SEQ ID NO: 79) | (SEQ ID NO: 80) |
| | 2,046,821 | | | |
| Avr1d | Scaffold_5: | 497 | CACGAGCAATGTCCTGTACG | CGAGCGTCCGATTTATAACTGG |
| | 5,919,385- | | (SEQ ID NO: 81) | (SEQ ID NO: 82) |
| | 5,919,881 | | | |
| Avr1k | Scaffold_6: | 303 | CTGTTCAGAAACTTCCGGTGC | CATGAAAAAGTCGGGGTTTG |
| | 3,142,499- | | (SEQ ID NO: 83) | (SEQ ID NO: 84) |
| | 3,142,801 | | | |
| Avr3a | Scaffold_9: | 607 | CTAGGCAAAGATGTCACCTG | ATCATGGCAAGCACCAATCT |
| | 615,324- | | (SEQ ID NO: 85) | (SEQ ID NO: 86) |
| | 615,930 | | | |
| Avr6 | Scaffold_4: | 726 | GTCGTGCTGCATACTCTTGG | CAAGCTTGAGGCTCTGTGCT |
| | 7,223,071- | | (SEQ ID NO: 87) | (SEQ ID NO: 88) |
| | 7,223,796 | | | |

^{†}Underlined nucleotides indicate discriminant nucleotide positions used to design the primers

[0187] To discriminate virulent from avirulent isolates with the remaining haplotypes (A vs B, C and D), two other pairs of primers were designed. These primers were based on SNPs 2046815 and 2067663, allowing to get an amplification when haplotype A is present, identifying the avirulent isolates only. These two SNPs were chosen because of LD with SNPs 2046815 and 2067663 and the presence of neighboring SNPs, allowing more specificity. These primers are located in the vicinity of the Avr1a gene (PHYSOscaffold_7: 2263667-2263879 and PHYSOscaffold_7: 1799519-1799796). The product size obtained is 213 bp for the first pair of primers and 278 bp for the second one, as shown in FIG. 2. The sequence of each primer is shown in Table 2.

[0188] Haplotypes for Avr1b

[0189] No CNVs or deletions were observed for Avr1b (FIG. 3a). Within the coding region of the gene, 17 variants were observed: 14 missense variants (SNPs), two small indels of three nucleotides each and one synonymous SNP. None of these variants were predicted to have a high functional impact. Based on the LD between these variants, two tag variants were retained and defined three haplotypes (FIG. 3b). Most isolates of haplotypes A and B were avirulent while all isolates with haplotype C were virulent. Among haplotypes A and B, four isolates with a discordant phenotype were re-tested with the hydroponic assay and were found to be avirulent to Rps1b (FIG. 3c), confirming haplotypes A and B as being consistently associated with an incompatible interaction with Rps1b (FIG. 3b). To verify that the genotype of these four isolates had not changed over time, we re-sequenced the Avr1b region of these isolates together with representative isolates from each haplotype group and confirmed the same mutations. Curiously, the isolate used for the reference genome (P6497) that is reported as virulent to Rps1b has a genotype associated with incompatibility in our study (haplotype A; FIG. 3b).

[0190] Based on the discriminant haplotypes between the avirulent and virulent isolates (A and B vs C), a pair of primers was designed within the two indels of four nucleotides to get an amplification when the isolates are avirulent (PHYSOscaffold_6:3146464-3146866). Their sequences are shown in Table 2 and the product size is 403 pb. The result of the amplification is shown in FIG. 4.

[0191] Haplotypes for Avr1c

[0192] Copy number variation was observed for Avr1c; complete deletion of the Avr1c gene was observed in three isolates while others presented one or two copies of the gene (FIG. 5b). Interestingly, this deletion is the same reported earlier for the Avr1a gene that immediately flanks Avr1c (FIG. 5b and FIG. 1b). The remaining isolates presented a total of 24 variants within the coding region of the gene; two were synonymous while the rest were missense mutations, none of which being predicted to have a high functional impact. After removal of redundant markers (based on LD), a total of four tag variants defined four haplotypes (A to D; FIG. 5b). Haplotypes C and D were shared by isolates that had a consistent phenotype, avirulent and virulent, respectively (FIG. 5b). Haplotype C was also the only haplotype to present a majority of heterozygous SNPs. In contrast, haplotype A was shared by five isolates previously phenotyped as avirulent to Rps1c and four phenotyped as being virulent. All nine isolates were re-phenotyped in the hydroponic assay and the results showed a clear association with virulence to Rps1c (FIG. 5c). For haplotype B, most isolates were phenotyped as avirulent to Rps1c, with the exception of three isolates (5B, 5C and 45B) originally labelled as virulent. Variants within a 1-kb upstream or downstream region of the gene could not define new haplotypes for these three outliers. These three isolates were re-phenotyped using the hydroponic bioassay and were still characterized as virulent (FIG. 5c). To further investigate the cause of this discrepancy, the Avr1c region for representative isolates from each haplotype group, including initial outliers from haplotype A, were re-sequenced using Sanger sequencing and confirmed the same mutations.

[0193] To discriminate the avirulent haplotypes B and C from the virulent haplotypes A and D (FIG. 5) for the Avr1c gene, two SNPs (U.S. Pat. Nos. 2,046,037, 2,046,038) were used at the 3′ extremity of the forward primers and four other SNPs (U.S. Pat. Nos. 2,046,815, 2,046,817, 2,046,819, 2,046,821) were used in the 5′ extremity of the reverse primer. The primer sequences are shown in Table 2 and their product size is 802 bp (PHYSOscaffold_7:2046020-2046821). FIG. 6 shows the specificity of these primers to discriminate avirulent from virulent isolates.

[0194] Haplotypes for Avr1d

[0195] A complete deletion of the Avr1d gene was observed for seven isolates (FIG. 7b). The deletion encompassed both the upstream and downstream regions of the gene for a total deletion size of 2.3 kb, with another upstream deletion of 0.8 kb, separated by a segment of 177 bp (FIG. 7a). The remaining isolates presented one copy of the gene and 21 variants were observed within the coding region: one was synonymous while the others were missense variants, none of which were predicted to have a high functional impact. Based on LD, one tag variant was retained and two haplotypes (A and B) could be defined. Genomic data coincided with the original phenotypes based on the hypocotyl assay in 25 out of 31 interactions. However, from the original phenotyping by Xue et al. (2015), two isolates predicted to be avirulent based on the genotype were phenotyped as virulent and four isolates predicted as virulent were phenotyped as avirulent. When these isolates were phenotyped with the hydroponic assay, all the isolates with a predicted genotype of virulence were consistently associated with virulence while the isolate expected to be avirulent based on the haplotype was phenotypically avirulent, confirming that deletion of Avr1d is consistently linked to virulence (FIG. 7).

[0196] To discriminate avirulent isolates from virulent ones (haplotypes A and B vs C), a pair of primers was designed in the Avr1d gene to get an amplification in presence of an avirulent isolates and no amplification when isolates are virulent, due to the complete deletion of the gene for those isolates (PHYSOscaffold_5:5919385-5919881). The primer sequences are shown in Table 2 and the amplification is presented in FIG. 8. The product size of the amplification is 497 bp.

[0197] Haplotypes for Avr1k

[0198] No CNVs or deletions were observed for Avr1k (FIG. 9). Inside the genic region, 16 variants were found: one synonymous variant, 14 missense variants and one deletion of eight nucleotides causing a frameshift in the ORF and leading to a premature stop codon towards the 3′ end of the gene. This latter variant is the only one considered to have a high impact on the functionality of the gene. The three tag variants within the gene (based on LD) formed three distinct haplotypes (FIG. 9b). As observed previously for Avr1b, the first two haplotypes (A and B) contained all the isolates avirulent to Rps1k plus four isolates previously phenotyped as virulent to Rps1k with the hypocotyl test. Interestingly, the exact same outliers gave an initial phenotype of virulence with Avr1b. To verify that the genotype of these outliers had not changed over time, the Avr1k gene region was re-sequenced for these isolates and showed the same mutations as observed by WGS. Haplotype C only contained isolates virulent to Rps1k. Re-phenotyping of the four outliers confirmed their incompatibility with Rps1k as shown in FIG. 9c. The eight-nucleotide frameshift mutation leading to an early stop codon was found in both haplotypes B and C, although the former was associated with an avirulent phenotype and the latter with a virulent one.

[0199] Based on avirulent haplotype A and B, a pair of primers was designed using two SNPs, based on the haplotype of SNP 3142827. The two SNPs were separated by six nucleotides and were discriminant between the avirulent and virulent isolates. The primer sequence is shown on Table 2. The position of the primers is on PHYSOscaffold_6: 3142499-3142801 and they allow to discriminate the avirulent isolates (haplotype A and B) from the virulent ones (haplotype C). The results of the amplification are shown in FIG. 10 and the product size is 303 bp. The sequences for each primer are shown in Table 2.

[0200] Haplotypes for Avr3a

[0201] Copy number variation was observed between isolates, ranging from one to four copies; all isolates virulent to Rps3a contained one copy of the gene, while all avirulent isolates had two to four copies (FIG. 11b). Furthermore, we observed 15 variants in the coding region of the Avr3a gene, including one inframe deletion of six nucleotides and 14 SNPs, of which two were synonymous variants, 11 were missense variants, and one caused the loss of the stop codon. Only the latter variant is considered to have a high impact on the functionality of the gene. All those variants were homozygous suggesting that for isolates with multiple copies of the Avr3a gene, every copy shares the same allele. Based on the retained tag variant, two distinct haplotypes were observed. Haplotype A was consistently associated with an incompatible interaction with Rps3a while haplotype B was associated with a compatible one (FIG. 11b).

[0202] Based on these results, a pair of primers was designed based on the indel of six nucleotides to discriminate haplotype A (avirulent) from haplotype B (virulent). This way, all the avirulent isolates will amplify because of the presence of the six nucleotides in the sequence of the forward primer. The primers position is on PHYSOscaffold_9: 615324-615930 and the product size is 607 bp long as shown in FIG. 12. The sequences of each primer is shown in Table 2.

[0203] Haplotypes for Avr6

[0204] No CNVs or deletions were observed for the Avr6 gene (FIG. 13a). Furthermore, no variants were found within the coding region of Avr6, but five were found in the upstream region of the gene. From these, four were SNPs, and one was a deletion of 15 nucleotides, but none of them were predicted to have a high functional impact. A visual inspection of these variants revealed two distinct haplotypes, represented by one tag variant in FIG. 13b. All isolates incompatible with Rps6 based on the hypocotyl test were associated with haplotype A, as well as four isolates initially phenotyped as virulent. These four isolates were found to be avirulent to Rps6 via the hydroponic assay (FIG. 13c). Isolates corresponding to haplotype B were consistently associated with a compatible interaction.

[0205] With the presence of an indel of 15 bp in the Avr6 gene which is discriminant between the avirulent (haplotype A) and virulent isolates (haplotype B), a pair of primers containing these 15 nucleotides was designed. In this way, amplification was obtained when isolates are avirulent. The amplification has a product size of 726 bp (FIG. 14) and is on PHYSOscaffold_4: 7223071-7223796. Their sequences are shown in Table 2.

[0206] Gene-Specific PCR-Based Markers for Seven Avr Genes in Phytophthora sojae

[0207] For all seven Avr genes under study, all primers were designed to amplify sequences associated with the avirulent allele of the genes (FIG. 23). In cases where the discriminant variants were located outside of the coding region, the primers were developed based on the specific haplotype linked to the avirulent allele. The positions of all the amplified regions are shown in Table 2.

[0208] For Avr1a gene, multiple variants distinguished alleles conferring virulence or avirulence on soybean lines carrying the Rps1a gene (FIG. 23A). One such variant was an 18-bp deletion conferring virulence to all isolates carrying it. For those isolates lacking the deletion, they were distinguished on the basis of two adjacent SNPs, found in two separate regions (Avr1a-snp1 and Avr1a-snp2), associated with a difference in virulence.

[0209] In the case of Avr1b, a combination of SNPs and indels, located within 15 bp of each other, was found to discriminate the avirulence allele (FIG. 23B). A primer was thus designed in that region to encompass all five variants. The Avr1c avirulent allele could be discriminated from the virulent form on the basis of two SNPs situated at the 3′ end of the forward primer, and four SNPs positioned at the 5′ end of the reverse primer (FIG. 23C). This design allowed to target specifically the avirulent haplotypes against several other haplotypes linked to virulence.

[0210] In the case of P. sojae isolates carrying Avr1d, they were easily distinguished from those with pathotype 1d on the basis of a complete deletion of the gene (FIG. 23D). Primers were thus simply designed to amplify a region within the gene.

[0211] For Avr1k, two SNPs were selected within 7 bp of each other that discriminated the avirulent allele from the virulent one to design the primers (FIG. 23E).

[0212] Based on two distinct haplotypes, the avirulent allele of Avr3a presented an extra sequence of six nucleotides (FIG. 23F). This area was therefore selected to design discriminate primers.

[0213] Finally, a 15-bp deletion upstream of Avr6 was consistently observed in all virulent isolates (FIG. 23G). As it was consistently associated with a phenotype of virulence, it was used for primer design.

[0214] Uniplex PCR Amplification and Specificity

[0215] The results showed that successful amplification of the functional version of the Avr genes matched perfectly the expected phenotype for each of the seven Avr genes, thus confirming the specificity of the primers for the targeted region (FIGS. 2, 4, 6, 8, 10, 12, 14). For six of the seven genes, a single set of primers was sufficient to discriminate the haplotypes leading to a virulent or avirulent reaction. In the case of Avr1a, four different haplotypes were exploited so three different pairs of primers were designed and included simultaneously in the molecular assay to cover the spectrum of possible haplotypes: Avr1a-indel, Avr1a-snp1 and Avr1a-snp2 (FIG. 2). As such, the combined presence of all three amplicons indicates avirulence.

[0216] Multiplex PCR Diagnostic Tool

[0217] Once all primers were individually tested for their ability to discriminate between virulent and avirulent isolates for each avirulence gene, they were mixed together in a single PCR reaction to check their compatibility in a multiplex PCR diagnostic tool. Following optimization of the PCR conditions, the molecular assay was carried out in two parallel runs: one multiplex assay for the detection of Avr1a, Avr1b, Avr1d, Avr1k, Avr3a and Avr6, and one assay for Avr1c. The presence of a band of a specific size as described in Table 1 indicates that the tested isolate carries the avirulent allele associated with the amplicon of the Avr gene of that size. Conversely, the absence of an amplicon for a given gene indicates that the isolate carries the corresponding pathotype. For example, FIG. 15 presents results from the multiplex PCR assay on the 31 known isolates with their corresponding pathotype based on a phenotypic assay. Results show that the pathotype, as expressed by the absence of an amplicon for a given gene, is accurately predicted by the molecular assay. As an illustration, isolate 1A shows amplicons for Avr1a, 1b, 1k, 3a and 6 (FIG. 15A) and none for 1d and 1c (FIG. 15C), which translates into pathotype 1c and 1d.

[0218] Genotyping and phenotyping of isolates with unknown pathotype After validation of the multiplex PCR assay with the 31 known isolates, 15 uncharacterized isolates were randomly selected to confirm the effectiveness of the assay. Representative results obtained following the molecular and hydroponic assays are presented for two isolates (FIG. 24). As seen in FIG. 24A, the presence of amplicons for Avr1b, Avr1d and Avr1k on the gel is indicative that isolate 2012-82 should have pathotype 1a, 1c, 3a, 6. When compared with the bioassay (FIG. 24B), the phenotypes obtained clearly corroborated the molecular assay where a compatible interaction was observed between the isolate and differentials Rps1a, 1c, 3a and 6. In the other example with isolate 2012-156 (FIG. 24C), the molecular assay showed amplification for Avr1a (Avr1a-snp1, Avr1a-indel, Avr1a-snp2), 1b, 1k, 3a and 6, which leads to a diagnostic of pathotype 1c, 1d for that isolate. Interestingly, the phenotypic assay shown in FIG. 24D confirmed the compatible interaction with differentials Rps1c and 1d but also suggested one with Rps3a, in spite of the molecular assay clearly showing an amplicon for Avr3a. As a matter of fact, when results were combined for all 15 isolates and seven Avr genes (105 interactions), there was only a single and similar discrepancy when the molecular assay and the phenotypes did not match perfectly (Table 3). Indeed, in four cases, a compatible interaction was observed with Rps3a in the hydroponic assay, in spite of the presence of an amplicon for the avirulent allele of Avr3a. All other interactions generated a perfect match between the molecular and the phenotyping assay for a prediction accuracy of 96% (101/105).

TABLE 3
Comparative results of predicted pathotypes between the molecular assay
and the hydroponic assay for 15 isolates of Phytophthora sojae

| | Predicted pathotype | Observed pathotype^{‡} |
|---|---|---|
| Isolate | (Molecular assay) | (Hydroponic assay) |
| 2010-29 | 1a, 1c | 1a, 1c, 3a |
| 2010-32 | 1a, 1c | 1a, 1c |
| 2010-42 | 1a, 1c | 1a, 1c |
| 2010-44 | 1a, 1c | 1a, 1c, 3a |
| 2011-35 | 1a, 1c, 3a | 1a, 1c, 3a |
| 2011-40 | 1a, 1b, 1c, 1k | 1a, 1b, 1c, 1k |
| 2012-01 | 1a, 1c, 3a, 6 | 1a, 1c, 3a, 6 |
| 2012-120 | 1a, 1c, 6 | 1a, 1c, 6 |
| 2012-127 | 1a, 1c | 1a, 1c |
| 2012-136 | 1a, 1c, 6 | 1a, 1c, 6 |
| 2012-156 | 1c, 1d | 1c, 1d, 3a |
| 2012-40 | 1a, 1c, 6 | 1a, 1c, 6 |
| 2012-57 | 1a, 1c, 1d | 1a, 1c, 1d |
| 2012-76 | 1a, 1c | 1a, 1c, 3a |
| 2012-82 | 1a, 1c, 3a, 6 | 1a, 1c, 3a, 6 |

^{‡}Underlined pathotype indicates discrepancy with the molecular assay

[0219] The studies described herein present the first molecular assay aimed at identifying Avr genes for the purpose of diagnosing the virulence profile of a plant pathogen. Up to this point, the only way to determine the pathotype of a given isolate was through cumbersome and long phenotyping procedures, each with its own shortcomings (Dorrance et al., 2008, Lebreton et al., 2018). Through this unique molecular assay, based on discriminant haplotypes at seven Avr genes of P. sojae, it should now be possible to obtain a rapid and accurate identification of the virulence profile of isolates in order to precisely select soybean material carrying the appropriate Rps genes.

[0220] Since the deployment of the first Rps gene in soybean, Rps1a, P. sojae has demonstrated a very strong resilience and ability to adapt to selection pressure through rapid mutations of Avr genes (Drenth et al., 1996, Kaitany et al., 2001, Keeling, 1984, Layton et al., 1986). As a result, the pathogen has evolved a staggering pathotype diversity (Dorrance, 2018, Dorrance et al., 2016, Dorrance et al., 2003, Sugimoto et al., 2012) that threatens current efforts to control its spread through genetic approaches. For instance, in a survey of P. sojae isolate diversity in Canada, Xue et al. (2015) reported an important shift in virulence over time, whereas most isolates now overcome Rps1k, the most recently introduced Rps gene, while this pathotype was completely absent in Canadian fields 20 years ago. This ability to alter Avr genes appears to be based on mutations that range from complete deletion of the gene or copy number variation, to presence of indels or single point mutations within or in close proximity to the gene (Qutob et al., 2009, Tyler and Gijzen, 2014).

[0221] Provided herein is an exhaustive description and comparison of haplotype diversity at seven Avr genes (1a, 1b, 1c, 1d, 1k, 3a, 6) of P. sojae through whole-genome sequencing of 31 isolates with different pathotypes. Their results offer a precise blueprint of sequence variation and conservation in each gene, results that we exploited to identify discriminant regions associated with different phenotypes.

[0222] In the process of trying to develop a molecular assay based on the discriminant haplotypes, several challenges were encountered at different stages of the study. First, acquisition of virulence for a pathogen is often due to a partial or complete deletion of the Avr gene. In the studies described herein, this phenomenon was only systematically observed in the case of Avr1d, which meant that we had to conduct an exhaustive analysis of the upstream and downstream regions of the other Avr genes to find SNPs/indels that would segregate haplotypes associated with avirulence from those associated with virulence. In certain instances, as for Avr1a, 1c and 6, the discriminating regions were located outside of the coding region of the gene.

[0223] When the molecular assay was applied to the 31 isolates that we had also phenotyped, we were able to show a perfect adequation between the two approaches. This confirms that the molecular assay constitutes a valid substitute to the long phenotyping assays and offers a much more practical approach to determine pathotypes of P. sojae isolates. It can thus find applications in delineating with precision the deployment of soybean lines carrying the proper Rps genes to overcome the pathotypes present in a given environment. Furthermore, as new resistance genes are discovered and introgressed into soybean, the test can be adapted to include new Avr genes and follow the evolution of new pathotypes over time. Finally, it may be used to assess other gene-for-gene dependent plant-pathogen interactions.

[0224] Upon testing the accuracy of the molecular assay with 15 isolates of unknown virulence, we notably observed a significant level of validation of the molecular assay, i.e. a 96% level of concordance between the molecular and the phenotyping assays (the only four cases of discrepancy out of 105 interactions tested were related to Avr3a). In summary, described herein is a comprehensive molecular assay capable of defining the pathotypes of Phytophthora pathogens, based on Avr genes, with unprecedented ease and precision. Its other advantages can be found in eliminating the shortcomings of the different phenotyping procedures while reducing time and resources involved in the process. It can also have practical applications for breeders and growers in management of the disease with a tailored deployment of use of Rps genes based on a precise and rapid determination of pathotypes present in a given area.

TABLE 4
SNPs and indels described herein

| Gene | SNP(s) | Indel(s) | FIGS. |
|---|---|---|---|
| Avr1a | 2033340 (A to T) 2046815 (A to G) | Deletion within positions 2042427 and 2042445 | 1, 16, 23 |
| | 2067663 (T to C) | | |
| | 2214437 (C to T) | | |
| | 2263686 (C to G) | | |
| | 2263687 (A to G) | | |
| | 2263686-2263687 (CA to GG) | | |
| | 1799779 (G to A) | | |
| | 1799780 (A to C) | | |
| | 1799779-1799780 (GA to AC) | | |
| Avr1b | 3146564 (T to G) | 3146481: Indel (TAAG vs. T), deletion of AAG at | 3, 17, 23 |
| | 3146466 (G to A) | positions 3146482 to 3146484; | |
| | 3146467 (G to A) | 3146477: Indel (T vs. TGCA), insertion of GCA | |
| | 3146468 (G to A) | between positions 3146477 and 3146478 | |
| | 3146466-3146467 (GG to AA) | | |
| | 3146467-3146468 (GG to AA) | | |
| | 3146466-3146468 (GGG to AAA) | | |
| Avr1c | 2046577 (C to T) | Deletion | 5, 18, 23 |
| | 2046694 (C to A) | | |
| | 2046815 (A to G) | | |
| | 2046839 (T to A) | | |
| | 2046037 (G to C) | | |
| | 2046038 (A to C) | | |
| | 2046037-2046038 (GA to CC) | | |
| | 2046815 (G to A) | | |
| | 2046817 (A to T) | | |
| | 2046819 (G to A) | | |
| | 2046821 (C to A) | | |
| Avr1d | 5920122 (A to G) | Deletion within positions 5919167 and 5922387 | 7, 19, 23 |
| Avr1k | 3142750 (T to G) | 3143184: Indel (T vs. TAAGTAGCA); insertion of | 9, 20, 23 |
| | 3142827 (G to A) | AAGTAGCA between positions 3143284 and | |
| | 3142512 (T to C) | 3143285 | |
| | 3142519 (C to G) | | |
| Avr3a | 615438 (T to A) | 615329: Indel (CAAAGAT vs. C), deletion of | 11, 21, 23 |
| | | AAAGAT at positions 615330-615335 | |
| Avr6 | | 7223782: Indel (AGAGCCTCAAGCTTG [SEQ ID | 13, 22, 23 |
| | | NO: 89] vs. A); deletion of GAGCCTCAAGCTTG | |
| | | (SEQ ID NO: 90) at positions 7223783-7223796) | |

TABLE 5
Correspondence of SNP/Indel position(s) with positions in SEQ NOs: 1-70

| Gene | SNP(s)/Indel(s) | Corresponding position(s) in SEQ ID NOs: 1-70 | FIG. |
|---|---|---|---|
| Avr1a | 2033340 (A to T) | Position 1001 in SEQ ID NOs: 1-6 | 16C |
| | 2046815 (A to G) | Position 693 in SEQ ID NOs: 13-19 | 16L |
| | 2067663 (T to C) | Position 1001 in SEQ ID NOs: 20-25 | 16Q |
| | 2214437 (C to T) | Position 1001 in SEQ ID NOs: 26-28 and 31; Position 1010 | 16V |
| | | in SEQ ID NOs: 29-30 | |
| | 2263686 (C to G) | Position 1016 in SEQ ID NOs: 32-38 | 16AA |
| | 2263687 (A to G) | Position 1017 in SEQ ID NOs: 32-38 | 16AA |
| | 2263686-2263687 (CA to | Positions 1016-1017 in SEQ ID NOs: 32-38 | 16AA |
| | GG) | | |
| | 1799779 (G to A) | Position 1261 in SEQ ID NOs: 39-44 | 16GG |
| | 1799780 (A to C) | Position 1262 in SEQ ID NOs: 39-44 | 16GG |
| | 1799779-1799780 (GA to | Positions 1261-62 in SEQ ID NOs: 39-44 | 16GG |
| | AC) | | |
| | Deletion within positions | 2042427 corresponds to position 1229 in SEQ ID NOs: | 16I |
| | 2042427 and 2042445 | 13-18; 2042445 corresponds to position 1247 in SEQ ID NOs: | |
| | | 13-18 | |
| Avr1b | 3146564 (T to G) | Position 1401 in SEQ ID NOs: 45-46; Position 1404 in SEQ | 17D |
| | | ID NO: 47; Position 1412 in SEQ ID NOs: 48-49 | |
| | 3146466 (G to A) | Position 1306 in SEQ ID NOs: 45-46; Position 1309 in SEQ | 17D |
| | | ID NO: 47; Position 1317 in SEQ ID NOs: 48-49 | |
| | 3146467 (G to A) | Position 1307 in SEQ ID NOs: 45-46; Position 1310 in SEQ | 17D |
| | | ID NO: 47; Position 1318 in SEQ ID NOs: 48-49 | |
| | 3146468 (G to A) | Position 1308 in SEQ ID NOs: 45-46; Position 1311 in SEQ | 17D |
| | | ID NO: 47; Position 1319 in SEQ ID NOs: 48-49 | |
| | 3146466-3146467 (GG to | Positions 1306-1307 in SEQ ID NOs: 45-46; Positions | 17D |
| | AA) | 1309-1310 in SEQ ID NO: 47; Positions 1317-1318 in SEQ ID | |
| | | NOs: 48-49 | |
| | 3146467-3146468 (GG to | Positions 1307-1308 in SEQ ID NOs: 45-46; Positions | 17D |
| | AA) | 1310-1311 in SEQ ID NO: 47; Positions 1318-1319 in SEQ ID | |
| | | NOs: 48-49 | |
| | 3146466-3146468 (GGG to | Positions 1306-1308 in SEQ ID NOs: 45-46; Positions | 17D |
| | AAA) | 1309-1311 in SEQ ID NO: 47; Positions 1317-1319 in SEQ ID | |
| | | NOs: 48-49 | |
| | 3146481: Indel (TAAG vs. | 3146481 corresponds to position 1318 in SEQ ID NOs: | 17D |
| | T), deletion of AAG at | 45-46, position 1321 in SEQ ID NO: 47, position 1332 in SEQ | |
| | | ID NO: 48, position 1329 in SEQ ID NO: 49; 3146482 to | |
| | positions 3146482 to | 3146484 correspond to positions 1319-1321 in SEQ ID | |
| | 3146484; | NOs: 45-46, position 1322-1324 in SEQ ID NO: 47, position | |
| | | 1330-1332 in SEQ ID NO: 49 | |
| | 3146477: Indel (T vs. | 3146477 corresponds to position 1317 in SEQ ID NOs: | 17D |
| | TGCA), insertion of GCA | 45-46, position 1320 in SEQ ID NO: 47, position 1328 in SEQ | |
| | between positions 3146477 | ID NOs: 48-49 | |
| | and 3146478 | | |
| Avr1c | 2046577 (C to T) | Position 1557 in SEQ ID NOs: 50-53 and 56; Position 1560 | 18D |
| | | in SEQ ID NO: 54 | |
| | 2046694 (C to A) | Position 1673 in SEQ ID NOs: 50-53 and 56; Position 1676 | 18E |
| | | in SEQ ID NO: 54 | |
| | 2046815 (A to G) | Position 1795 in SEQ ID NOs: 50-53 and 56; Position 1798 | 18E |
| | | in SEQ ID NO: 54 | |
| | 2046839 (T to A) | Position 1819 in SEQ ID NOs: 50-53 and 56; Position 1822 | 18E |
| | | in SEQ ID NO: 54; position 3 in SEQ ID NO: 55 | |
| | 2046037 (G to C) | Position 1017 in SEQ ID NOs: 50-53 and 56; Position 1020 | 18C |
| | | in SEQ ID NO: 54 | |
| | 2046038 (A to C) | Position 1018 in SEQ ID NOs: 50-53 and 56; position 1021 | 18C |
| | | in SEQ ID NO: 54 | |
| | 2046037-2046038 (GA to | Positions 1017-1018 in SEQ ID NOs: 50-53 and 56; | 18C |
| | CC) | Positions 1020-1021 in SEQ ID NO: 54 | |
| | 2046817 (A to T) | Position 1797 in SEQ ID NOs: 50-53 and 56; position 1800 | 18E |
| | | in SEQ ID NO: 54 | |
| | 2046819 (G to A) | Position 1799 in SEQ ID NOs: 50-53 and 56; position 1802 | 18E |
| | | in SEQ ID NO: 54 | |
| | 2046821 (C to A) | Position 1801 in SEQ ID NOs: 50-53 and 56; position 1804 | 18E |
| | | in SEQ ID NO: 54 | |
| | Deletion | | |
| Avr1d | 5920122 (A to G) | Position 1738 in SEQ ID NOs: 57-58; position 1762 in SEQ | |
| | | ID NO: 59 | |
| | Deletion within positions | 5919167 corresponds to position 784 in SEQ ID NOs: | 19C |
| | 5919167 and 5922387 | 57-58, position 807 in SEQ ID NO: 59 | |
| | (following position | | |
| | 5919167) | | |
| Avr1k | 3142750 (T to G) | Position 1510 in SEQ ID NOs: 61-62 and 64; position 1511 | 20D |
| | | in SEQ ID NO: 63 | |
| | 3142827 (G to A) | Position 1587 in SEQ ID NOs: 61-62 and 64; position 1588 | 20D |
| | | in SEQ ID NO: 63 | |
| | 3142512 (T to C) | Position 1272 in SEQ ID NOs: 61-62 and 64; position 1273 | 20C |
| | | in SEQ ID NO: 63 | |
| | 3142519 (C to G) | Position 1279 in SEQ ID NOs: 61-62 and 64; position 1280 | 20C |
| | | in SEQ ID NO: 63 | |
| | 3143184: Indel (T vs. | Position 3143184 corresponds to position 944 in SEQ ID | 20D |
| | TAAGTAGCA); insertion of | NOs: 61-62 and 64 and position 1945 in SEQ ID NO: 63; | |
| | AAGTAGCA between | position 3143185 corresponds to position 945 in SEQ ID | |
| | positions 3143184 and | NOs: 61-62, position 1954 in SEQ ID NO: 63 and position | |
| | 3143185 | 1953 in SEQ ID NO: 64 | |
| Avr3a | 615438 (T to A) | Position 1334 in SEQ ID NO: 65-66, position 1375 in SEQ | 21C |
| | | ID NO: 67 | |
| | 615329: Indel (CAAAGAT | 615329 corresponds to position 1225 in SEQ ID NOs. 65-66 | 21C |
| | vs. C), deletion of AAAGAT | position 1272 in SEQ ID NO: 67; 615330 corresponds to | |
| | at positions 615330-615335 | position 1226 in SEQ ID NOs. 65-66; 615335 corresponds | |
| | | to position 1231 in SEQ ID NOs. 65-66 | |
| Avr 6 | 7223782: Indel | 7223782 corresponds to position 1712 in SEQ ID NOs: | 22D |
| | (AGAGCCTCAAGCTTG | 68-69, position 1711 in SEQ ID NO: 70; 7223783 corresponds | |
| | [SEQ ID NO: 89] vs. A); | to position 1713 in SEQ ID NOs: 68-69; position 7223796 | |
| | deletion of | corresponds to position 1726 in SEQ ID NOs: 68-69 | |
| | GAGCCTCAAGCTTG | | |
| | (SEQ ID NO: 90) at | | |
| | positions 7223783-7223796) | | |

TABLE 6
Sequences described herein

| SEQ ID | |
|---|---|
| NO(s): | Description |
| 1 | avr1a_2033340_refgenome; consensus (FIG. 16A-E) |
| 2-6 | avr1a haplotypes A-E, respectively (FIG. 16A-E) |
| 7 | avr1a_refgenome (FIG. 16F-J) |
| 8-11 | avr1a haplotypes A-D, respectively (FIG. 16F-J) |
| 12 | consensus (FIG. 16F-J) |
| 13 | avr1a_2046815_refgenome (FIG. 16K-N) |
| 14-18 | avr1a haplotypes A-E, respectively (FIG. 16K-N) |
| 19 | consensus (FIG. 16K-N) |
| 20 | vr1a_2067663_refgenome; consensus (FIG. 16O-S) |
| 21-25 | avr1a haplotypes A-E, respectively (FIG. 16O-S) |
| 26 | avr1a_2214437_refgenome; consensus (FIG. 16T-X) |
| 27-31 | avr1a haplotypes A-E, respectively (FIG. 16T-X) |
| 32 | avr1a_snp1_2263686-87_refgenome (FIG. 16Y-CC) |
| 33-37 | avr1a haplotypes A-E, respectively (FIG. 16Y-CC) |
| 38 | consensus (FIG. 16Y-CC) |
| 39 | avr1a_snp2_2067663_refgenome; consensus (FIG. 16DD-HH) |
| 40-44 | avr1a haplotypes A-E, respectively (FIG. 16DD-HH) |
| 45 | avr1b_refgenome (FIG. 17A-G) |
| 46-48 | avr1b haplotypes A-C, respectively (FIG. 17A-G) |
| 49 | consensus (FIG. 17A-G) |
| 50 | avr1c_refgenome (FIG. 18A-G) |
| 51-55 | avr1c haplotypes A-E, respectively (FIG. 18A-G) |
| 56 | consensus (FIG. 18A-G) |
| 57 | avr1d_refgenome; consensus (FIG. 19A-F) |
| 58-60 | avr1d haplotypes A-C, respectively (FIG. 19A-F) |
| 61 | avr1k_refgenome (FIG. 20A-E) |
| 62-64 | avr1k haplotypes A-C, respectively (FIG. 20A-E) |
| 65 | avr3a_refgenome; consensus (FIG. 21A-F) |
| 66-67 | avr3a haplotypes A-B, respectively |
| 68 | avr6_refgenome; consensus (FIG. 22A-F) |
| 69-70 | avr6 haplotypes A-B, respectively (FIG. 22A-F) |
| 71-88 | primers (Table 2) |
| 89 | Avr6 indel (Table 4) |
| 90 | Avr6 indel (Table 4); deleted sequence |
| 91 | P. sojae genomic sequence: PHYSOscaffold_4 dna:supercontig |
| | supercontig:P_{—}sojae_V3_0:PHYSOscaffold_4:1:7609242:1 |
| 92 | P. sojae genomic sequence: PHYSOscaffold_5 dna:supercontig |
| | supercontig:P_{—}sojae_V3_0:PHYSOscaffold_5:1:6830280:1 |
| 93 | P. sojae genomic sequence: PHYSOscaffold_6 dna:supercontig |
| | supercontig:P_{—}sojae_V3_0:PHYSOscaffold_6:1:4785000:1 |
| 94 | P. sojae genomic sequence: PHYSOscaffold_7 dna:supercontig |
| | supercontig:P_{—}sojae_V3_0:PHYSOscaffold_7:1:4006126:1 |
| 95 | P. sojae genomic sequence: PHYSOscaffold_9 dna:supercontig |
| | supercontig:P_{—}sojae_V3_0:PHYSOscaffold_9:1:3285870:1 |

[0225] Although the present invention has been described hereinabove by way of specific embodiments thereof, it can be modified, without departing from the spirit and nature of the subject invention as defined in the appended claims. In the claims, the word “comprising” is used as an open-ended term, substantially equivalent to the phrase “including, but not limited to”. The singular forms “a”, “an” and “the” include corresponding plural references unless the context clearly dictates otherwise.

### REFERENCES

[0226] Bolger, A. M., Lohse, M., and Usadel, B. 2014. Trimmomatic: a flexible trimmer for Illumina sequence data. Bioinformatics. 30:2114-2120.
[0227] Cingolani, P., Platts, A., Wang, L. L., Coon, M., Fly, T. N., 2012. A program for annotating and predicting the effects of single nucleotide polymorphisms, SnpEff: SNPs in the genome of Drosophila melanogaster strain w1118; iso-2; . . . Taylor & Francis.
[0228] DePristo, M. A., Banks, E., Poplin, R., Garimella, K. V., Maguire, J. R., Hartl, C., et al. 2011. A framework for variation discovery and genotyping using next-generation DNA sequencing data. Nature Genetics 2011 43:5. 43:491-498.
[0229] Dong, S., Yu, D., Cui, L., Qutob, D., Tedman-Jones, J., Kale, S. D., et al. 2011. Sequence Variants of the Phytophthora sojae RXLR Effector Avr3a/5 Are Differentially Recognized by Rps 3a and Rps 5 in Soybean ed. Ching-Hong Yang. PLoS ONE. 6:e20172.
[0230] Dorrance, A. E., Jia, H., and Abney, T. S. 2004. Evaluation of Soybean Differentials for Their Interaction with Phytophthora sojae. PHP.
[0231] Dou, D., Kale, S. D., Liu, T., Tang, Q., Wang, X., Arredondo, F. D., et al. 2010. Different Domains of Phytophthora sojae Effector Avr4/6 Are Recognized by Soybean Resistance Genes Rps4 and Rps6. http://dx.doi.org.acces.bibl.ulaval.ca/10.1094/MPMI-23-4-0425.23:425-435.
[0232] Gijzen, M., Forster, H., Coffey, M. D., and Tyler, B. 1996. Cosegregation of Avr4 and Avr6 in Phytophthora sojae. Canadian Journal of Botany. 74:800-802.
[0233] Goss, E. M., Press, C. M., One, N. G. P., 2013. Evolution of RXLR-class effectors in the oomycete plant pathogen Phytophthora ramorum.journals.plos.org.
[0234] Haas, J. H., and Buzzell, R. I. 1976. New races 5 and 6 of Phytophthora megasperma var. sojae and differential reactions of soybean cultivars for races 1 to 6. Phytopathology.
[0235] Kadam, S., Vuong, T. D., Qiu, D., Meinhardt, C. G., Song, L., Deshmukh, R., et al. 2016. Genomic-assisted phylogenetic analysis and marker development for next generation soybean cyst nematode resistance breeding. Plant Science. 242:342-350.
[0236] Kamoun, S., Furzer, O., Jones, J. D. G., Judelson, H. S., Ali, G. S., Dalio, R. J. D., et al. 2015. The Top 10 oomycete pathogens in molecular plant pathology. Molecular Plant Pathology. 16:413-434.
[0237] Kilen, T. C., Hartwig, E. E., and Keeling, B. L. 1974. Inheritance of a Second Major Gene for Resistance to Phytophthora Rot in Soybeans 1. Crop Science. 14:260-262.
[0238] Knaus, B. J., and Grünwald, N. J. 2017. vcfr: a package to manipulate and visualize variant call format data in R. Molecular Ecology Resources. 17:44-53.
[0239] Lebreton, A., Labbe, M. C., de Ronne, M. M., Xue, D. A., Marchand, M. G., and Belanger, D. R. R. 2018. Development of a simple hydroponic assay to study vertical and horizontal resistance of soybean and pathotypes of Phytophthora sojae. https://doi-org.acces.bibl.ulaval.ca/10.1094/PDIS-04-17-0586-RE. :PDIS-04-17-0586-RE.
[0240] Li, H., and Durbin, R. 2009. Fast and accurate short read alignment with Burrows-Wheeler transform. Bioinformatics. 25:1754-1760.
[0241] MacGregor, T., Bhattacharyya, M., Tyler, B., Bhat, R., Schmitthenner, A. F., and Gijzen, M. 2002. Genetic and Physical Mapping of Avr1a in Phytophthora sojae. Genetics. 160:949-959.
[0242] May, K. J., Whisson, S. C., Zwart, R. S., Searle, I. R., Irwin, J. A. G., MacLean, D. J., et al. 2002. Inheritance and mapping of 11 avirulence genes in Phytophthora sojae. Fungal Genetics and Biology. 37:1-12.
[0243] Morrison, R. H., and Thorne, J. C. 1978. Inoculation of Detached Cotyledons For Screening Soybeans Against Two Races of Phytophthora Megasperma Var. Sojae 1. Crop Science. 18:1089-1091.
[0244] Na, R., Yu, D., Chapman, B. P., Zhang, Y., Kuflu, K., Austin, R., et al. 2014. Genome Re-Sequencing and Functional Analysis Places the Phytophthora sojae Avirulence Genes Avr1c and Avr1a in a Tandem Repeat at a Single Locus ed.
[0245] Niklaus J Grünwald. PLoS ONE. 9:e89738.
[0246] Pazdernik, D. L., Hartman, G. L., Huang, Y. H., and Hymowitz, T. 2007. A Greenhouse Technique for Assessing Phytophthora Root Rot Resistance in Glycine max and G. soja.
[0247] http://dx.doi.org.acces.bibl.ulaval.ca/10.1094/PDIS.1997.81.10.1112.81:1112-1114.
[0248] Pfaffl, M. W., Horgan, G. W., research, L. D. N. A., 2002. Relative expression software tool (REST©) for group-wise comparison and statistical analysis of relative expression results in real-time PCR. academic.oup.com.
[0249] Qutob, D., Tedman-Jones, J., Dong, S., Kuflu, K., Pham, H., Wang, Y., et al. 2009. Copy Number Variation and Transcriptional Polymorphisms of Phytophthora sojae RXLR Effector Genes Avr1a and Avr3a ed. Frederick M Ausubel. PLoS ONE. 4:e5066.
[0250] Raffaele, S., Farrer, R. A., Cano, L. M., Studholme, D. J., MacLean, D., Thines, M., et al. 2010. Genome Evolution Following Host Jumps in the Irish Potato Famine Pathogen Lineage. Science. 330:1540-1543.
[0251] Ruijter, J. M., Ramakers, C., acids, W. H. N., 2009. Amplification efficiency: linking baseline and bias in the analysis of quantitative PCR data. academic.oup.com.
[0252] Sahoo, D. K., Abeysekara, N. S., Cianzio, S. R., one, A. R. P., 2017. A Novel Phytophthora sojae Resistance Rps12 Gene Mapped to a Genomic Region That Contains Several Rps Genes. journals.plos.org.
[0253] Schmitthenner, A. F., Hobe, M., and Bhat, R. G. 1994. Phytophthora sojae races in Ohio over a 10-year interval. Plant Disease. 78:269-276.
[0254] Song, T., Kale, S. D., Arredondo, F. D., Shen, D., Su, L., Liu, L., et al. 2013. Two RxLR Avirulence Genes in Phytophthora sojae Determine Soybean Rps1k-Mediated Disease Resistance.
[0255] http://dx.doi.org.acces.bibl.ulaval.ca/10.1094/MPMI-12-12-0289-R. 26:711-720.
[0256] Tardivel, A., Sonah, H., Belzile, F., and O'Donoughue, L. S. 2014. Rapid Identification of Alleles at the Soybean Maturity Gene E3 using genotyping by Sequencing and a Haplotype-Based Approach. The Plant Genome. 7:0.
[0257] Tyler, B. M., and Gijzen, M. 2014. The Phytophthora sojae Genome Sequence: Foundation for a Revolution. In Genomics of Plant-Associated Fungi and Oomycetes: Dicot Pathogens, Berlin, Heidelberg: Springer Berlin Heidelberg, p. 133-157.
[0258] Tyler, B. M., Forster, H., Plant-Microbe, M. C. M., 1995. Inheritance of avirulence factors and restriction fragment length polymorphism markers in outcrosses of the oomycete Phytophthora sojae. Molecular Plant-Microbe Interactions.
[0259] Tyler, B. M., Tripathy, S., Zhang, X., Dehal, P., Jiang, R. H. Y., Aerts, A., et al. 2006. Phytophthora Genome Sequences Uncover Evolutionary Origins and Mechanisms of Pathogenesis. Science. 313:1261-1266.
[0260] Verta, J. P., Landry, C. R., and MacKay, J. 2016. Dissection of expression-quantitative trait locus and allele specificity using a haploid/diploid plant system—insights into compensatory evolution of transcriptional regulation within populations. New Phytologist. 211:159-171.
[0261] Wagner, R. E., Wilkinson, H. W. P., 1992. An aeroponics system for investigating disease development on soybean taproots infected with Phytophthora sojae. apsnet.org.
[0262] Ward, E., Lazarovits, G., Unwin, C. H., Phytopathology, R. B., 1979. Hypocotyl reactions and glyceollin in soybeans inoculated with zoospores of Phytophthora megasperma var. sojae. apsnet.org.
[0263] Whisson, S. C. 1995. Phytophthora sojaeAvirulence Genes, RAPD, and RFLP Markers Used to Construct a Detailed Genetic Linkage Map. Molecular Plant-Microbe Interactions. 8:988.
[0264] Xue, A. G., Marchand, G., Chen, Y., Zhang, S., Cober, E. R., and Tenuta, A. 2015. Races of Phytophthora sojae in Ontario, Canada, 2010-2012. Canadian Journal of Plant Pathology. 37:376-383.
[0265] Zeng, P., Zhou, X., and Huang, S. 2017. Prediction of gene expression with cis-SNPs using mixed models and regularization methods. BMC Genomics 2017 18:1. 18:368

The application's sequence listing, which the Patent Office published only in electronic form, follows.

SEQUENCE LISTING (95 sequences)

SEQ ID NO: 1 - DNA, 1687 bp, Phytopthora sojae
gcgcttgacatcggcgaatcgccactccgtttcgcaccattccgcggcttattttctgcccaaacatgcaaatattaattcccccatacttctatctactagcgaagcaatgttacggccaaccaatataaaccctcttcgttctcgtcgatgccgaagcactcttgcgagattgctgcaattgccgtgctctaaatatgacaagcacgccaagtcaattcggacaatcatgttgacaactcaataatacactcatatcatacctcacgaccgtcgtagcgcgcggctccccacggtgcatccataacggcacctgccgctcccttactctgtgtccaatgccggcagttggcacagcgtgttcagcccttgaccgccgcgccgcttggggcttctcccactacccccaacaacatttaccacattgacgcattagcaacagccctgcaactatatcagttctctagtgacccacacgcaccctcttggtgggcactggttctgtggcgatggtcccggccgtattctcctcttgctgctggcgccgcttcctctccctcgcggccctgctgcgtctctgcgagtcctgcaccttgttcgcggcaagtgtcagatcctgcagcgtactgcgatactcgaggatcgcgcggtactcgcgctgcaggtccttcagaaactaaatgcatggtgttagtgggcaaatttttagcgctatgagcccagattgagtcgcacctcgcgcgcctcgggatctccatggagctgtgtctccagcgtcttccgcacggcgcggaactccgggatgccccgatcgtagtcgcccagcaagcacagctcccgcgcgcgcagcagcgcgtattgcgcactcttggccgatgccgccatgttgctcgccatcttgaaatgcaacagtgatcatcactcttctggcgccaatgcacatgattggccaatacaaaagtctcttttcagcgaatcgtatgtacgattactacaactgagcgatgtaccgctttaaccggtacatcgctctcgaggctgacacgtagcggggcataggacgtcactcgacagaacgtcgaccggcaggagagagagacacagagaccccgccatacacacacagacacagtagcgcagccatggtggagcttacggacctgcagattgtggccatcgcggtgacgggcgtgacgctggtgctgctggcgatggcggcgcgcgtgctgctgccgagcaagacagacgaggtggacgagtcgctgcaggccatgatcaacggcttcgacttcgcgctgcccgaggaggtggagcagtaccgcaagggcaaggaggagcacccggaggacacggacaagtgcttccagctgctgttccgccgcgccgtggccgacatcccgctcatccgcaagatccagtcggagagctcgggcatccagcgcctcaagaagaacgacatcctcaaggacggctcctacctcagctacaagctggccgaggagatgatcaacgacgagatcaacgaagtgcgcagggaagccgaggagctcaagccgggtaagcctttacccccttgtcttggtcaattgtatgtcgccgattgctgactcgttgttattgctgttgtgcttgttgctgcaggcgagggctggcccgacaagatcttcccccaggccgtgcagtgtat

SEQ ID NO: 2 - DNA, 1687 bp, Phytopthora sojae; identical to SEQ ID NO: 1

SEQ ID NO: 3 - DNA, 1687 bp, Phytopthora sojae; identical to SEQ ID NO: 1

SEQ ID NO: 4 - DNA, 1687 bp, Phytopthora sojae
gcgcttgacatcggcgaatcgccactccgtttcgcaccattccgcggcttattttctgcccaaacatgcaaatattaattcccccatacttctatctactagcgaagcaatgttacggccaaccaatataaaccctcttcgttctcgtcgatgccgaagcactcttgcgagattgctgcaattgccgtgctctaaatatgacaagcacgccaagtcaattcggacaatcatgttgacaactcaataatacactcatatcatacctcacgaccgtcgtagcgcgcggctccccacggtgcatccataacggcacctgccgctcccttactctgtgtccaatgccggcagttggcacagcgtgttcagcccttgaccgccgcgccgcttggggcttctcccactacccccaacaacatttaccacattgacgcattagcaacagccctgcaactatatcagttctctagtgacccacacgcaccctcttggtgggcactggttctgtggcgatggtcccggccgtattctcctcttgctgctggcgccgcttcctctccctcgcggccctgctgcgtctctgcgagtcctgcaccttgttcgcggcaagtgtcagatcctgcagcgtactgcgatactcgaggatcgcgcggtactcgcgctgcaggtccttcagaaactaaatgcatggtgttagtgggcaaatttttagcgctatgagcccagattgagtcgcacctcgcgcgcctcgggatctccatggagctgtgtctccagcgtcttccgcacggcgcggaactccgggatgccccgatcgtagtcgcccagcaagcacagctcccgcgcgcgcagcagcgcgtattgcgcactcttggccgatgccgccatgttgctcgccatcttgaaatgcaacagtgatcatcactcttctggcgccaatgcacatgattggccaatacaaaagtctcttttcagcgaatcgtatgtacgattactacaactgtgcgatgtaccgctttaaccggtacatcgctctcgaggctgacacgtagcggggcataggacgtcactcgacagaacgtcgaccggcaggagagagagacacagagaccccgccatacacacacagacacagtagcgcagccatggtggagcttacggacctgcagattgtggccatcgcggtgacgggcgtgacgctggtgctgctggcgatggcggcgcgcgtgctgctgccgagcaagacagacgaggtggacgagtcgctgcaggccatgatcaacggcttcgacttcgcgctgcccgaggaggtggagcagtaccgcaagggcaaggaggagcacccggaggacacggacaagtgcttccagctgctgttccgccgcgccgtggccgacatcccgctcatccgcaagatccagtcggagagctcgggcatccagcgcctcaagaagaacgacatcctcaaggacggctcctacctcagctacaagctggccgaggagatgatcaacgacgagatcaacgaagtgcgcagggaagccgaggagctcaagccgggtaagcctttacccccttgtcttggtcaattgtatgtcgccgattgctgactcgttgttattgctgttgtgcttgttgctgcaggcgagggctggcccgacaagatcttcccccaggccgtgcagtgtat

SEQ ID NO: 5 - DNA, 1687 bp, Phytopthora sojae; identical to SEQ ID NO: 1

SEQ ID NO: 6 - DNA, 1687 bp, Phytopthora sojae; identical to SEQ ID NO: 1

SEQ ID NO: 7 - DNA, 1813 bp, Phytopthora sojae
ttgcagctcccacctcgcgatatccacccgctgagcccaggaaatacagcgccgctgccaccttcttttcgtaggaatgcttcttgaccttagcttgtgcaaaagcgaccccatgctcttgtagaaagctagctatacggaagaaggtggatctcgtacagcgcagattggtctcgaaccagcttgagtaggctgatgattgaagcatcgactcgaagcgcagagtggtgacggtaaaacggttcttcttgccagcaggaggtcctagttcacaactgtctgcatacaaagccacagccgtgccacggcggagcacgcagcgaggacaattgcatcttcgtctcccatgttgtgcctggccctgtaaatctctaggtagatccgcccctctccacctcaaagagctggagacgaattcacagtgccatctctagttgtcttgttgtgtgctacctacttttgaccaatccggtcacacttttggttttcgtctccatctagcgaacaggctcttaaatatcactgggtagtacgattaggattacagacaacgacggataaaatacggcaacgcaaaacccggcacacatatgttgtactttttacaataagaaattcagatagccaatcatcttcgagatttacacttgacatttgtaatccatatggttttaagtacgttctctaaatttgtgtgtactttatgcatccttgcgagaattattacctgaaaggttagctacaatctgtgcgaaaaacgtccaaatttgttcttctacccggtatggtatactgaaacacatattattccttatgctgtctgggacggtttaagcgttttaaatgacctctccgcgtccaacgggttaatagacatgtacagtatatgtattaccgtcacttgacgaatcacactgtgacggtctccagaccacgatgaccttgaatctcattctgcgtttctccttccagttatcaagagcccgaccaccaagcgacaatgcgcctaaccaacaccctcgtcgtggctgttgctgccatccttctcgcaagcgaaaacgctttttctgcagcaactgatgccgaccaggctaccgtttcgaagttggcggcagcggagttcgacacgttggtcgatgtcctcaccactgagagcaagagatcccttcgggccacggtcgatgacggcgaagagaggtacaagcagtttaaaatcgaagccttgaaaaaaggaaagtggacggatattttcaacaaatggaagggtaacgagcttagtccggccgaggtccagaacaagctgaaaaacaagaaattgagcgacgatttgaaagacgctattttcaggaattataaagactggtagactggtacttcggtacatgctccagcggcacgtacatgaaaatcgtcggggagttgacactgtgacaagttctcgaatcgtctgtaccagtccgtccttgcaatacacttgagagaaaatgcagacaatcttttcaccttgaacccgtgtttccttcatgtcgttggatcttactttttttttagcagagtggagcagaaaatcttgactataatagccttcttgtacgctcggaacttgtaaacgattctctactgctacgcaaccccgtcgtgaaattttagcggtgcaacctcggagcggtaccatgcatcatgggtccttattagcttatttacgtttgcggttacgacggaggataagggagttctcatgaattgagatagctcttgcttagagcctgttcgcgttgtactagagatggagatggtgcttgatctccaccta

SEQ ID NO: 8 - DNA, 1813 bp, Phytopthora sojae
ttgcagctcccacctcgcgatatccacccgctgagcccaggaaatacagcgccgctgccaccttcttttcgtaggaatgcttcttgaccttagcttgtgcaaaagcgaccccatgctcttgtagaaagctagctatacggaagaaggtggatctcgtacagcgcagattggtctcgaaccagcttgagtaggctgatgattgaagcatcgactcgaagcgcagagtggtgacggtaaaacggttcttcttgccagcaggaggtcctagttcacaactgtctgcatacaaagccacagccgtgccacggcggagcacgcagcgaggacaattgcatcttcgtctcccatgttgtgcctggccctgtaaatctctaggtagatccgcccctctccacctcaaagagctggagacgaattcacagtgccatctctagttgtcttgttgtgtgctacctacttttgaccaatccggtcacacttttggttttcgtctccatctagcgaacaggctcttaaatatcactgggtagtacgattaggattacagacaacgacggataaaatacggcaacgcaaaacccggcacacatatgttgtactttttacaataagaaattcagatagccaatcatcttcgagatttacacttgacatttgtaatccatatggttttaagtacgttctctaaatttgtgtgtactttatgcatccttgcgagaattattacctgaaaggttagctacaatctgtgcgaaaaacgtccaaatttgttcttctacccggtatggtatactgaaacacatattattycttatgctgtcygggacggtttaagcgttttaaatgacctctccgcgtccaacgggttaatagacatgtacagtatatgtattaccgkcacttgacgaatcacactgtgacggtctccagaccacgatgaccttgaatctcattctgcgtttctccttccagttatcaagagcccgaccaccaagcgacaatgcgcctaaccaacaccctcgtcgtggctgttgctgccatccttctcgcaagcgaaaacgctttttctgcagcaactgatgccgaccaggctaccgtttcgaagttggcggcagcggagttcgacacgttggtcgatgtcctcaccactgagagcaagagatcccttcgggccacggtcgatgacggcgaagagaggtacaagcagtttaaaatcgaagccttgaaaaaaggaaagtggacggatattttcaacaaatggaagggtaacgagcttagtccggccgaggtccagaacaagctgaaaaacaagaaattgagcgacgatttgaaagacgctattttcaggaattataaagactggtagactggtacttcggtacatgctccagcggcacgtacatgaaaatcgtcggggagttgacactgtgacaagttctcgaatcgtctgtaccagtccgtccttgcaatacacttgagagaaaatgcagacaatcttttcaccttgaacccgtgtttccttcatgtcgttggatcttactttttttttagcagagtggagcagaaaatcttgactataatagccttcttgtacgctcggaacttgtaaacgattctctactgctacgcaaccccgtcgtgaaattttagcggtgcaacctcggagcggtaccatgcatcatgggtccttattagcttatttacgtttgcggttacgacggaggataagggagttctcatgaattgagatagctcttgcttagagcctgttcgcgttgtactagagatggagatggtgsttgatctccaccta

SEQ ID NO: 9 - DNA, 1813 bp, Phytopthora sojae
ttgcagctcccacctcgcgatatccacccgctgagcccaggaaatacagcgccgctgccaccttcttttcgtaggaatgcttcttgaccttagcttgtgcaaaagcgaccccatgctcttgtagaaagctagctatacggaagaaggtggatctcgtacagcgcagattggtctcgaaccagcttgagtaggctgatgattgaagcatcgactcgaagcgcagagtggtgacggtaaaacggttcttcttgccagcaggaggtcctagttcacaactgtctgcatacaaagccacagccgtgccacggcggagcacgcagcgaggacaattgcatcttcgtctcccatgttgtgcctggccctgtaaatctctaggtagatccgcccctctccacctcaaagagctggagacgaattcacagtgccatctctagttgtcttgttgtgtgctacctacttttgaccaatccggtcacacttttggttttcgtctccatctagcgaacaggctcttaaatatcactgggtagtacgattaggattacagacaacgacggataaaatacggcaacgcaaaacccggcacacatatgttgtactttttacaataagaaattcagatagccaatcatcttcgagatttacacttgacatttgtaatccatatggttttaagtacgttctctaaatttgtgtgtactttatgcatccttgcgagaattattacctgaaaggttagctacaatctgtgcgaaaaacgtccaaatttgttcttctacccggtatggtatactgaaacacatattattycttatgctgtcygggacggtttaagcgttttaaatgacctctccgcgtccaacgggttaatagacatgtacagtatatgtattaccgkcacttgacgaatcacactgtgacggtctccagaccacgatgaccttgaatctcattctgcgtttctccttccagttatcaagagcccgaccaccaagcgacaatgcgcctaaccaacaccctcgtcgtggctgttgctgccatccttctcgcaagcgaaaacgctttttctgcagcaactgatgccgaccaggctaccgtttcgaagttggcggcagcggagttcgacacgttggtcgatgtcctcaccactgagagcaagagatcccttcgggccacggtcgatgacggcgaagagaggtacaagcagtttaaaatcgaagccttgaaaaaaggaaagtggacggatattttcaacaaatggaagggtaacgagcttagtccggccgaggtccagaacaagctgaaaaacaagaaattgagcgacgatttgaaagacgctattttcaggaattataaagactggtagactggtacttcggtacatgctccagcggcacgtacatgaaaatcgtcggggagttgacactgtgacaagttctcgaatcgtctgtaccagtccgtccttgcaatacacttgagagaaaatgcagacaatcttttcaccttgaacccgtgtttccttcatgtcgttggatcttactttttttttagcagagtggagcagaaaatcttgactataatagccttcttgtacgctcggaacttgtaaacgattctctactgctacgcaaccccgtcgtgaaattttagcggtgcaacctcggagcggtaccatgcatcatgggtccttattagcttatttacgtttgcggttacgacggaggataagggagttctcatgaattgagatagctcttgcttagagcctgttcgcgttgtactagagatggagatggtgcttgatctccaccta

SEQ ID NO: 10 - DNA, 1813 bp, Phytopthora sojae
ttgcagctcccacctcgcgatatccacccgctgagcccaggaaatacagcgccgctgccaccttcttttcgtaggaatgcttcttgaccttagcttgtgcaaaagcgaccccatgctcttgtagaaagctagctatacggaagaaggtggatctcgtacagcgcagattggtctcgaaccagcttgagtaggctgatgattgaagcatcgactcgaagcgcagagtggtgacggtaaaacggttcttcttgccagcaggaggtcctagttcacaactgtctgcatacaaagccacagccgtgccacggcggagcacgcagcgaggacaattgcatcttcgtctcccatgttgtgcctggccctgtaaatctctaggtagatccgcccctctccacctcaaagrgctggagacgaattcacagtgccatctctagttgtcttgttgtgtgctacctacttttgaccaatccggtcacacttttggttttcgtctccatctagcgaacaggctcttaaatatcactgggtagtacgattaggattacagacaacgacggataaaatacggcaacgcaaaacccggcacacatatgttgtactttttacaataagaaattcagatagccaatcatcttcgagatttacacttgacatttgtaatccatatggttttaagtacgttctctaaatttgtgtgtactttatgcatccttgcgagaattattacctgaaaggttagctacaatctgtgcgaaaaacgtccaaatttgttcttctacccggtatggtatactgaaacacatawtwttycttatgctgtcygggacggtttaagcgttttaaatgacctctccgcgtccaacgggttaatagacatgtacagtatatgtattaccgkcacttgacgaatcacactgtgacggtctccagaccacgatgaccttgaatctcattctgcgtttctccttccagttatcaagagcccgaccaccaagcgacaatgcgcctaaccaacaccctcgtcgtggctgttgctgccatccttctcgcaagcgaaaacgctttttctgcagcaactgatgccgaccaggctaccgtttcgaagttggcggcagcggagttcgacacgttggtcgatgtcctcaccactgagagcaagagatcccttcgggccacggtcgatgacggcgaagagaggtacaagcagtttaaaatcgaagccttgaaaaaaggaaagtggacggatattttcaacaaatggaagggtaacgagcttagtccggccgaggtccagaacaagctgaaaaacaagaaattgagcgacgatttgaaagacgctattttcaggaattataaagactggtagactggtacttcggtacatgctccagcggcacgtacatgaaaatcgtcggggagttgacactgtgacaagttctcgaatcgtctgtaccagtccgtccttgcaatacacttgagagaaaatgcagacaatcttttcaccttgaacccgtgtttccttcatgtcgttggatcttactttttttttagcagagtggagcagaaaatcttgactataatagccttcttgtwcgctcggaacttgtaaacgattctctactgctacgcaaccccgtcgtgaaattttagcggtgcaacctcggagcggtaccatgcatcatgggtccttattagcttatttacgtttgcggttacgacggaggataagggagttctcatgaattgagatagctcttgcttagagcctgttcgcgttgtactagagatggagatggtgcttgatctccaccta

SEQ ID NO: 11 - DNA, 1813 bp, Phytopthora sojae
ttgcagctcccacctcgcgatatccacccgctgagcccaggaaatacagcgccgctgccaccttcttttcgtaggaatgcttcttgaccttagcttgtgcaaaagcgaccccatgctcttgtagaaagctagctatacggaagaaggtggatctcgtacagcgcagattggtctcgaaccagcttgagtaggctgatgattgaagcatcgactcgaagcgcagagtggtgacggtaaaacggttcttcttgccagcaggaggtcctagttcacaactgtctgcatacaaagccacagccgtgccacggcggagcacgcagcgaggacaattgcatcttcgtctcccatgttgtgcctggccctgtaaatctctaggtagatccgcccctctccacctcaaagrgctggagacgaattcacagtgccatctctagttgtcttgttgtgtgctacctacttttgaccaatccggtcacacttttggttttcgtctccatctagcgaacaggctcttaaatatcactgggtagtacgattaggattacagacaacgacggataaaatacggcaacgcaaaacccggcacacatatgttgtactttttacaataagaaattcagatagccaatcatcttcgagatttacacttgacatttgtaatccatatggttttaagtacgttctctaaatttgtgtgtactttatgcatccttgcgagaattattacctgaaaggttagctacaatctgtgcgaaaaacgtccaaatttgttcttctacccggtatggtatactgaaacacatawtwttycttatgctgtcygggacggtttaagcgttttaaatgacctctccgcgtccaacgggttaatagacatgtacagtatatgtattaccgkcacttgacgaatcacactgtgacggtctccagaccacgatgaccttgaatctcattctgcgtttctccttccagttatcaagagcccgaccaccaagcgacaatgcgcctaaccaacaccctcgtcgtggctgttgctgccatccttctcgcaagcgaaaacgctttttctgcagcaactgatgccgaccaggctaccgtytcgaagttggcggcagcggagttcgacacgttggtcgatgtcctcaccactgagagcaagagatcccttcgggccacggtcgatgacggcgaagagaggtacaagcagtttaaaatcgaagccttgaaaaaaggaaagtggacggatattttcaacaaatggaagggtaacgagcttagtccggccgaggtccagaacaagctgaaaaacaagaaattgagcgacgatttgaaagacgctattttcaggaattataaagactggtagactggtacttcggtacatgctccagcggcacgtacatgaaaatcgtcggggagttgacactgtgacaagttctcgaatcgtctgtaccagtccgtccttgcaatacacttgagagaaaatgcagacaatcttttcaccttgaacccgtgtttccttcatgtcgttggatcttactttttttttagcagagtggagcagaaaatcttgactataatagccttcttgtwcgctcggaacttgtaaacgattctctactgctacgcaaccccgtcgtgaaattttagcggtgcaacctcggagcggtaccatgcatcatgggtccttattagcttatttacgtttgcggttacgacggaggataagggagttctcatgaattgagatagctcttgcttagagcctgttcgcgttgtactagagatggagakggkgcttgatctccaccta

SEQ ID NO: 12 - DNA, 1813 bp, Artificial Sequence
  Consensus sequence or oligonucleotide
  misc_feature (810)..(810): n is c or y
  misc_feature (822)..(822): n is t or y
  misc_feature (898)..(898): n is t or k
ttgcagctcccacctcgcgatatccacccgctgagcccaggaaatacagcgccgctgccaccttcttttcgtaggaatgcttcttgaccttagcttgtgcaaaagcgaccccatgctcttgtagaaagctagctatacggaagaaggtggatctcgtacagcgcagattggtctcgaaccagcttgagtaggctgatgattgaagcatcgactcgaagcgcagagtggtgacggtaaaacggttcttcttgccagcaggaggtcctagttcacaactgtctgcatacaaagccacagccgtgccacggcggagcacgcagcgaggacaattgcatcttcgtctcccatgttgtgcctggccctgtaaatctctaggtagatccgcccctctccacctcaaagagctggagacgaattcacagtgccatctctagttgtcttgttgtgtgctacctacttttgaccaatccggtcacacttttggttttcgtctccatctagcgaacaggctcttaaatatcactgggtagtacgattaggattacagacaacgacggataaaatacggcaacgcaaaacccggcacacatatgttgtactttttacaataagaaattcagatagccaatcatcttcgagatttacacttgacatttgtaatccatatggttttaagtacgttctctaaatttgtgtgtactttatgcatccttgcgagaattattacctgaaaggttagctacaatctgtgcgaaaaacgtccaaatttgttcttctacccggtatggtatactgaaacacatattattncttatgctgtcngggacggtttaagcgttttaaatgacctctccgcgtccaacgggttaatagacatgtacagtatatgtattaccgncacttgacgaatcacactgtgacggtctccagaccacgatgaccttgaatctcattctgcgtttctccttccagttatcaagagcccgaccaccaagcgacaatgcgcctaaccaacaccctcgtcgtggctgttgctgccatccttctcgcaagcgaaaacgctttttctgcagcaactgatgccgaccaggctaccgtttcgaagttggcggcagcggagttcgacacgttggtcgatgtcctcaccactgagagcaagagatcccttcgggccacggtcgatgacggcgaagagaggtacaagcagtttaaaatcgaagccttgaaaaaaggaaagtggacggatattttcaacaaatggaagggtaacgagcttagtccggccgaggtccagaacaagctgaaaaacaagaaattgagcgacgatttgaaagacgctattttcaggaattataaagactggtagactggtacttcggtacatgctccagcggcacgtacatgaaaatcgtcggggagttgacactgtgacaagttctcgaatcgtctgtaccagtccgtccttgcaatacacttgagagaaaatgcagacaatcttttcaccttgaacccgtgtttccttcatgtcgttggatcttactttttttttagcagagtggagcagaaaatcttgactataatagccttcttgtacgctcggaacttgtaaacgattctctactgctacgcaaccccgtcgtgaaattttagcggtgcaacctcggagcggtaccatgcatcatgggtccttattagcttatttacgtttgcggttacgacggaggataagggagttctcatgaattgagatagctcttgcttagagcctgttcgcgttgtactagagatggagatggtgcttgatctccaccta

SEQ ID NO: 13 - DNA, 1379 bp, Phytopthora sojae
gattgcgtgacttcgtgcaattggctgtgattgggtcacacaaatatccggaacgtgcccatcatccttgcgagaattattacctgaaaggttagctacaatctgtgcgaaaaacgtccaaatttgttcttctactcggtatggtatactgaaacacatattatttcttatgctgtccgggacggtttaagcgttttaaatgacctctccgcgtccaacgggttaatagacatgtacagtatatgtattaccgtcacttgacgaatcacactgtgacggtctccagaccacgatgaccttgaatctcattctgcgtttctccttccagttatcaagagcccgaccaccaagcgacaatgcgcctaaccaacaccctcgtcgtggctgttgctgccatccttctcgcaagcgaaaacgctttttctgcagcaactgatgccgaccaggctaccgtctcgaagtttgcggcagcggagttcgacacgttggtcgatgtcctcaccactgagagcaagagatcccttcgggccacggtcgatgacggcgaagagaggtacaagctgtttaaaatcgaagccttgcaacaaggaaagtggacttcattttttaaaaaatggagctcgaacggccgtactgagtccgacatcaagaaaaagctggcgaatgttaaatggctgtccgaatctgacaaaagtaagattgtcgataattatgtattccacttgagaggtcattagatacatgctccagcggcacgtgcatggagaccgtcggggagttgacactgtgacaagttctcgaatcgtctgtaccagtccgtccttgcaatacacttgagagaaaatgcagacaatcttttcaccttgaacccgtgtttccttcatgtcgttggatcttactttttttttagcagagtggagcagaaaatcttgactataatagccttcttgtacgctcggaacttgtaaacgattctctactgctacgcaaccccgtcgtgaaattttagcggtgcaacctcggagcggtaccatgcatcatgggtccttattagcttatttacgtttgcggttacgacggaggataagggagttctcatgaattgagatagctcttgcttagagcctgttcgcgttgtactagagatggagatggtgcttgatctccacctacagctcgttcgctatgtatccatctccagacaaattttaagccaatcacaggacagatatgggatggctctcctccccacttgagaaaatgccgactcgcctcaccagtgcggccacgcgtgcggcacatgccgctgctcaaggctcgtcggttcctgcgccccccgcacgtcatgacgaaacgccagcgttcgagcccctcgtctc

SEQ ID NO: 14 - DNA, 1379 bp, Phytopthora sojae
gattgcgtgacttcgtgcaattggctgtgattgggtcacacaaatatccggaacgtgcccatcatccttgcgagaattattacctgaaaggttagctacaatctgtgcgaaaaacgtccaaatttgttcttctacycggtatggtatactgaaacacatattattycttatgctgtcygggacggtttaagcgttttaaatgacctctccgcgtccaacgggttaatagacatgtacagtatatgtattaccgkcacttgacgaatcacactgtgacggtctccagaccacgatgaccttgaatctcattctgcgtttctccttccagttatcaagagcccgaccaccaagcgacaatgcgcctaaccaacaccctcgtcgtggctgttgctgccatccttctcgcaagcgaaaacgctttttctgcagcaactgatgccgaccaggctaccgtytcgaagttkgcggcagcggagttcgacacgttggtcgatgtcctcaccactgagagcaagagatcccttcgggccacggtcgatgacggcgaagagaggtacaagctgtttaaaatcgaagccttgcaacaaggaaagtggacttcattttttaaaaaatggagctcgaacggccgtactgagtccgacatcaagaaaaagctggcgaatgttaaatggctgtccgaatctgacaaaagtaagattgtcgataattatgtattccacttgagaggtcattagatacatgctccagcggcacgtgcatggagaccgtcggggagttgacactgtgacaagttctcgaatcgtctgtaccagtccgtccttgcaatacacttgagagaaaatgcagacaatcttttcaccttgaacccgtgtttccttcatgtcgttggatcttactttttttttagcagagtggagcagaaaatcttgactataatagccttcttgtacgctcggaacttgtaaacgattctctactgctacgcaaccccgtcgtgaaattttagcggtgcaacctcggagcggtaccatgcatcatgggtccttattagcttatttacgtttgcggttacgacggaggataagggagttctcatgaattgagatagctcttgcttagagcctgttcgcgttgtactagagatggagatggtgcttgatctccacctacagctcgttcgctaygtatccatctccagacaaattttaagccaatcacaggacagatatgggatggctctcctccccacttgagaaaatgccgactcgcctcaccagtgcggccacgcgtgcggcacatgccgctgctcaaggctcgtcggttcctgcgccccccgcacgtcatgacgaaacgccagcgttcgagcccctcgtctc

SEQ ID NO: 15 - DNA, 1379 bp, Phytopthora sojae
gattgcgtgacttcgtgcaattggctgtgattgggtcacacaaatatccggaacgtgcccatcatccttgcgagaattattacctgaaaggttagctacaatctgtgcgaaaaacgtccaaatttgttcttctacycggtatggtatactgaaacacatattattycttatgctgtcygggacggtttaagcgttttaaatgacctctccgcgtccaacgggttaatagacatgtacagtatatgtattaccgkcacttgacgaatcacactgtgacggtctccagaccacgatgaccttgaatctcattctgcgtttctccttccagttatcaagagcccgaccaccaagcgacaatgcgcctaaccaacaccctcgtcgtggctgttgctgccatccttctcgcaagcgaaaacgctttttctgcagcaactgatgccgaccaggctaccgtctcgaagtttgcggcagcggagttcgacacgttggtcgatgtcctcaccactgagagcaagagatcccttcgggccacggtcgatgacggcgaagagaggtacaagctgtttaaaatcgaagccttgcaacaaggaaagtggacttcattttttaaaaaatggagctcgaacggccgtactgagtccgacatcaagaaaaagctggcgaatgttaaatggctgtccgaatctgacaaaagtaagattgtcgataattatgtattccacttgagaggtcattagatacatgctccagcggcacgtgcatggagaccgtcggggagttgacactgtgacaagttctcgaatcgtctgtaccagtccgtccttgcaatacacttgagagaaaatgcagacaatcttttcaccttgaacccgtgtttccttcatgtcgttggatcttactttttttttagcagagtggagcagaaaatcttgactataatagccttcttgtacgctcggaacttgtaaacgattctctactgctacgcaaccccgtcgtgaaattttagcggtgcaacctcggagcggtaccatgcatcatgggtccttattagcttatttacgtttgcggttacgacggaggataagggagttctcatgaattgagatagctcttgcttagagcctgttcgcgttgtactagagatggagatggtgcttgatctccacctacagctcgttcgctaygtatccatctccagacaaattttaagccaatcacaggacagatatgggatggctctcctccccacttgagaaaatgccgactcgcctcaccagtgcggccacgcgtgcggcacatgccgctgctcaaggctcgtcggttcctgcgccccccgcacgtcatgacgaaacgccagcgttcgagcccctcgtctc

SEQ ID NO: 16 - DNA, 1379 bp, Phytopthora sojae
gattgcgtgacttcgtgcaattggctgtgattgggtcacacaaatatccggaacgtgcccatcatccttgcgagaattattacccgaaaggttagctacaatctgtgcgaaaaacgtccaaatttgttcttctacccggtatggtatactgaaacacatawtwtttcttatgctgtccgggacggtttaagcgttttaaatgacctctccgcgtccaacgggttaatagacatgtacagtatatgtattaccgkcacttgacgaatcacactgtgacggtctccagaccacgatgaccttgaatctcattctgcgtttctccttccagttatcaagagcccgaccaccaagcgacaatgcgcctaaccaacaccctcgtcgtggctgttgctgccatccttctcgcaagcgaaaacgctttttctgcagcaactgatgccgaccaggctaccgtctcgaagtttgcggcagcggagttcgacacgttggtcgatgtcctcaccactgagagcaagagatcccttcgggccacggtcgatgacggcgaagagaggtacaagctgtttaaaaaagaagccttgcaacaaggaaagtggacttcattttttaacaaatggagcgcgagaggccgttctgagtccgacatcaagaacaagatggcgaaaattacatggctgaccgaatctgacaaaggaaggcttgtcgataattatggaaactacttgaaaggttattagatacatgctccagcggcacgtgcatggagaccgtcggggagttgacactgtgacaagttctcgaatcgtctgtaccagtccgtccttgcaatacacttgagagaaaatgcagacaatcttttcaccttgaacccgtgtttccttcatgtcgttggatcttactttttttttagcagagtggagcagaaaatcttgactataatagccttcttgtwcgctcggaacttgtaaacgattctctactgctacgcaaccccgtcgtgaaattttagcggtgcaacctcggagcggtaccatgcatcatgggtccttattagcttatttacgtttgcggttacgacggaggataagggagttctcatgaattgagatagctcttgcttagagcctgttcgcgttgtactagagatggagatggtgcttgatctccacctacagctcgttcgctaygtatccatctccagacaaattttaagccaatcacaggacagatatgggatggctctcctccccacttgagaaaatgccgactcgcctcaccagtgcggccacgcgtgcggcacatgccgctgctcaaggctcgtcggttcctgcgccccccgcacgtcatgacgaaacgccagcgttcgagcccctcgtctc

SEQ ID NO: 17 - DNA, 1379 bp, Phytopthora sojae
  misc_feature (62)..(77): n is a, c, g, or t
gattgcgtgacttcgtgcaattggctgtgattgggtcacacaaatatccggaacgtgcccannnnnnnnnnnnnnnntattacctgaaaggttagctacaatytgtgcgaaaaacgtccaaatttgttcttctacccggtatggtatactgaaacacatawtwttycttatgctgtcygggacggtttaagcgttttaaatgacctctccgcgtccaacgggttaatagacatgtacagtatatgtattaccgkcacttgacgaatcacactgtgacggtctccagaccacgatgaccttgaatctcattctgcgtttctccttccagttatcaagagcccgaccaccaagcgacaatgcgcctaaccaacaccctcgtcgtggctgttgctgccatccttctcgcaagcgaaaacgctttttctgcagcaactgatgccgaccaggctaccgtctcgaagtttgcggcagcggagttcgacacgttggtcgatgtcctcaccactgagagcaagagatcccttcgggccacggtcgatgacggcgaagagaggtacaagctgtttaaaaaagaagccttgcaacaaggaaagtggacttcattttttaacaaatggagcgcgagaggccgttctgagtccgacatcaagaacaagatggcgaaaattacatggctgaccgaatctgacaaaggaaggcttgtcgataattatggaaactacttgaaaggttattagatacatgctccagcggcacgtgcatggagaccgtcggggagttgacactgtgacaagttctcgaatcgtctgtaccagtccgtccttgcaatacacttgagagaaaatgcagacaatcttttcaccttgaacccgtgtttccttcatgtcgttggatcttactttttttttagcagagtggagcagaaaatcttgactataatagccttcttgtwcgctcggaacttgtaaacgattctctactgctacgcaaccccgtcgtgaaattttagcggtgcaacctcggagcggtaccatgcatcatgggtccttattagcttatttacgtttgcggttacgacggaggataagggagttctcatgaattgagatagctcttgcttagagcctgttcgcgttgtactagagatggagatggtgcttgatctccacctacagctcgttcgctaygtatccatctccagacaaattttaagccaatcacaggacagatatgggatggctctcctccccacttgagaaaatgccgactcgcctcaccagtgcggccacgcgtgcggcacatgccgctgctcaaggctcgtcggttcctgcgccccccgcacgtcatgacgaaacgccagcgttcgagcccctcgtctc

SEQ ID NO: 18 - DNA, 1379 bp, Phytopthora sojae
gattgcgtgacttcgtgcaattggctgtgattgggtcacacaaatatccggaacgtgcccatcatccttgcgagaattattacctgaaaggttagctacaatctgtgcgaaaaacgtccaaatttgttcttctactcggtatggtatactgaaacacatattatttcttatgctgtccgggacggtttaagcgttttaaatgacctctccgcgtccaacgggttaatagacatgtacagtatatgtattaccgtcacttgacgaatcacactgtgacggtctccagaccacgatgaccttgaatctcattctgcgtttctccttccagttatcaagagcccgaccaccaagcgacaatgcgcctaaccaacaccctcgtcgtggctgttgctgccatccttctcgcaagcgaaaacgctttttctgcagcaactgatgccgaccaggctaccgtctcgaagtttgcggcagcggagttcgacacgttggtcgatgtcctcaccactgagagcaagagatcccttcgggccacggtcgatgacggcgaagagaggtacaagctgtttaaaatcgaagccttgcaacaaggaaagtggacttcattttttaaaaaatggagctcgaacggccgtactgagtccgacatcaagaaaaagctggcgaatgttaaatggctgtccgaatctgacaaaagtaagattgtcgataattatgtattccacttgagaggtcattagatacatgctccagcggcacgtgcatggagaccgtcggggagttgacactgtgacaagttctcgaatcgtctgtaccagtccgtccttgcaatacacttgagagaaaatgcagacaatcttttcaccttgaacccgtgtttccttcatgtcgttggatcttactttttttttagcagagtggagcagaaaatcttgactataatagccttcttgtacgctcggaacttgtaaacgattctctactgctacgcaaccccgtcgtgaaattttagcggtgcaacctcggagcggtaccatgcatcatgggtccttattagcttatttacgtttgcggttacgacggaggataagggagttctcatgaattgagatagctcttgcttagagcctgttcgcgttgtactagagatggagatggtgcttgatctccacctacagctcgttcgctaygtatccatctccagacaaattttaagccaatcacaggacagatatgggatggctctcctccccacttgagaaaatgccgactcgcctcaccagtgcggccacgcgtgcggcacatgccgctgctcaaggctcgtcggttcctgcgccccccgcacgtcatgacgaaacgccagcgttcgagcccctcgtctc

SEQ ID NO: 19 - DNA, 1379 bp, Artificial Sequence
  Consensus sequence or oligonucleotide
  misc_feature (136)..(136): n is t, y or c
  misc_feature (254)..(254): n is t or k
gattgcgtgacttcgtgcaattggctgtgattgggtcacacaaatatccggaacgtgcccatcatccttgcgagaattattacctgaaaggttagctacaatctgtgcgaaaaacgtccaaatttgttcttctacncggtatggtatactgaaacacatattatttcttatgctgtccgggacggtttaagcgttttaaatgacctctccgcgtccaacgggttaatagacatgtacagtatatgtattaccgncacttgacgaatcacactgtgacggtctccagaccacgatgaccttgaatctcattctgcgtttctccttccagttatcaagagcccgaccaccaagcgacaatgcgcctaaccaacaccctcgtcgtggctgttgctgccatccttctcgcaagcgaaaacgctttttctgcagcaactgatgccgaccaggctaccgtctcgaagtttgcggcagcggagttcgacacgttggtcgatgtcctcaccactgagagcaagagatcccttcgggccacggtcgatgacggcgaagagaggtacaagctgtttaaaatcgaagccttgcaacaaggaaagtggacttcattttttaaaaaatggagctcgaacggccgtactgagtccgacatcaagaaaaagctggcgaatgttaaatggctgtccgaatctgacaaaagtaagattgtcgataattatgtattccacttgagaggtcattagatacatgctccagcggcacgtgcatggagaccgtcggggagttgacactgtgacaagttctcgaatcgtctgtaccagtccgtccttgcaatacacttgagagaaaatgcagacaatcttttcaccttgaacccgtgtttccttcatgtcgttggatcttactttttttttagcagagtggagcagaaaatcttgactataatagccttcttgtacgctcggaacttgtaaacgattctctactgctacgcaaccccgtcgtgaaattttagcggtgcaacctcggagcggtaccatgcatcatgggtccttattagcttatttacgtttgcggttacgacggaggataagggagttctcatgaattgagatagctcttgcttagagcctgttcgcgttgtactagagatggagatggtgcttgatctccacctacagctcgttcgctatgtatccatctccagacaaattttaagccaatcacaggacagatatgggatggctctcctccccacttgagaaaatgccgactcgcctcaccagtgcggccacgcgtgcggcacatgccgctgctcaaggctcgtcggttcctgcgccccccgcacgtcatgacgaaacgccagcgttcgagcccctcgtctc

SEQ ID NO: 20 - DNA, 1687 bp, Phytopthora sojae
ctggatcatggatggggctacaatccaccgacacccggaaattattcactatctacgaagcgtcggtgtagtggtgatcttcttgccagcgtattgtccgttttttaatcctatcgagttcctcttcggatacgtcaagcgctcctttcaacgacactactcggaagctagcgggcgagatttgactccattcgtcgttcagacgtttcaacgcttcagagatttcgacatgagcaaggtgttcgagcactgcggttggaagaaacaaggctacttcgatcctgttgtacctctttcaagtgagaacaaagccgaactcgctgctagtgaacgcaaccaagatgaattagagtttacggaacttgaatcgtaagagtagcttaaactcatcaacatgtaatcctttttctttcgtcactcggcgtgctctgtgtcttcgacgttctccatttgaaggagagggtcgatcacttcgtcgcgagcaggaggggtgatgtcgcgcagaaaccccatgataacactcttgcgcacctccaaacggcgctcattttcatcgagatactgtccgagaaattcccacctttggcgcagctgccggtagtcagcaattgtggccgccacaacatctagcgccacatttgccgttcgagtaacttcggccacgtgttgctccatctgtgtatccacgagtcgaagcagattcgcgatatactctggtggtgattgttgaatagcgacgtcccacgttgaccttttgagattccgcgtgagatggttggcccacagacgccaaacaacaccttcaccttggaatgtagccgcccattgctctcgaagtctctccacaacatctcgcaacgaggtctcagcggttgcgcccgcacgatcggtctcctcaggctgtatgcaggctgcgacgaattcatctcgatcttgagctcttgcgatcgacaaaccatactcgtagataacgagcgtcactgtatgccctcgcattttttgcagccactgcttccacgcttgtgctgacttggtagactccactaccttctttttggccctgaactgcatgacacggtcccactcgcccacctcgtgggtctcgacagaccactcgccgtccgtccgcaccgctctgcacttgacacggccactgaacaagctccagatcttctgcaggatctcgtcgaacgatccgccgttgacaacgacgtcgtcgagagtctcggccgacgtatcgcgttgggcgatggtcgccttcacgattggccgcaatagcaactggtacagatgacttggagctgcttggtctgcttcagttgttgcttcgtgcatgctctcaggccgtggcagcgacgtgaccactcgcgatgtagctggtgctgctggaggtgccgccaacaaaccaacggatcgtgcaggagaaacagtagcgggtgctgccggtgctcatgtcgctggaagctgctgcggccgaagcgctgctggggtcgcttgtagtggtcgtgttccttgaccactggcgtctgtttgcgatggagatgcgcgtggagccactgtgggctgcgaggtcgacggagagctgcctggcgtcggggtgcggcttcgcaatgggtacggcgagacacgcgtaagaatgggctggcgtggcgacctccgtggtgtggccaccatggtgcaattccag

SEQ ID NO: 21 - DNA, 1687 bp, Phytopthora sojae
ctggatcatggatggggctacaatccaccgacacccggaaattattcactatctacgaagcgtcggtgtagtggtgatcttcttgccagcgtattgtccgttttttaatcctatcgagttcctcttcggatacgtcaagcgctcctttcaacgacactactcggaagctagcgggcgagatttgactccattcgtcgttcagacgtttcaacgcttcagagatttcgacatgagcaaggtgttcgagcactgcggttggaagaaacaaggctacttcgatcctgttgtacctctttcaagtgagaacaaagccgaactcgctgctagtgaacgcaaccaagatgaattagagtttacggaacttgaatcgtaagagtagcttaaactcatcaacatgyaatcctttttctttcgtcactcggcgtgctctgtgtcttcgacgttctccatttgaaggagagggtcgatcacttcgtcgcgagcaggaggggtgatgtcgcgcagaaaccccatgataacactcttgcgcacctccaaacggcgctcattttyatcgagatactgtccgagaaattcccacctttggcgcagctgccggtagtcagcaattgtggcckccacaacatctagcgccacatttgccgttcgagtaacttcggccacgtgttgctccatctgtgtatccacgagtcgaagcarattcgcgatatactctggtggtgattgttgaatagcgacgtcccacgttgaccttttgagattccgcgtgagatggttggcccacagacgccaaacaacaccttcaccttggaatgtagccgcccattgctctcgaagtctctccacaacatctcgcaacgaggtctcagcggttgcgcccgcacgatcggtctcctcaggctgtatgcaggctgcgacgaattcatctcgatcttgagctcttgcgatcgacaaaccatactcgtagataacgagcgtcactgtatgccctcgcattttttgcagccactgcttccacgcttgtgctgacttggtagactccactaccttctttttggccctgaactgcatgacacggtcccactcgcccacctcgtgggtctcgacagaccactcgccgtccgtccgcaccgctctgcacttgacacggccactgaacaagctccagatcttctgcaggatctcgtcgaacgatccgccgttgacaacgacgtcgtcgagagtctcggccgacgtatcgcgttgggcgatggtcgccttcacgattggccgcaatagcaactggtacagatgacttggagctgcttggtctgcttcagttgttgcttcgtgcatgctctcaggccgtggcagcgacgtgaccactcgcgatgtagctggtgctgctggaggtgccgccaacaaaccaacggatcgtgcaggagaaacagtagcgggtgctgccggtgctcatgtcgctggaagctgctgcggccgaagcgctgctggggtcgcttgtagtggtcgtgttccttgaccactggcgtctgtttgcgatggagatgcgcgtggagccactgtgggctgcgaggtcgacggagagctgcctggcgtcggggtgcggcttcgcaatgggtacggcgagacacgcgtaagaatgggctggcgtggcgacctccgtggtgtggccaccatggtgcaattccag

SEQ ID NO: 22 - DNA, 1687 bp, Phytopthora sojae
ctggatcatggatggggctacaatccaccgacacccggaaattattcactatctacgaagcgtcggtgtagtggtgatcttcttgccagcgtattgtccgttttttaatcctatcgagttcctcttcggatacgtcaagcgctcctttcaacgacactactcggaagctagcgggcgagatttgactccattcgtcgttcagacgtttcaacgcttcagagatttcgacatgagcaaggtgttcgagcactgcggttggaagaaacaaggctacttcgatcctgttgtacctctttcaagtgagaacaaagccgaactcgctgctagtgaacgcaaccaagatgaattagagtttacggaacttgaatcgtaagagtagcttaaactcatcaacatgtaatcctttttctttcgtcactcggcgtgctctgtgtcttcgacgttctccatttgaaggagagggtcgatcacttcgtcgcgagcaggaggggtgatgtcgcgcagaaaccccatgataacactcttgcgcacctccaaacggcgctcattttcatcgagatactgtccgagaaattcccacctttggcgcagctgccggtagtcagcaattgtggccgccacaacatctagcgccacatttgccgttcgagtaacttcggccacgtgttgctccatctgtgtatccacgagtcgaagcagattcgcgatatactctggtggtgattgttgaatagcgacgtcccacgttgaccttttgagattccgcgtgagatggttggcccacagacgccaaacaacaccttcaccttggaatgtagccgcccattgctctcgaagtctctccacaacatctcgcaacgaggtctcagcggttgcgcccgcacgatcggtctcctcaggctgtatgcaggctgcgacgaattcatctcgatcttgagctcttgcgatcgacaaaccatactcgtagataacgagcgtcactgtatgccctcgcatttttcgcagccactgcttccacgcttgtgctgacttggtagactccactaccttctttttggccctgaactgcatgacacggtcccactcgcccacctcgtgggtctcgacagaccactcgccgtccgtccgcaccgctctgcacttgacacggccactgaacaagctccagatcttctgcaggatctcgtcgaacgatccgccgttgacaacgacgtcgtcgagagtctcggccgacgtatcgcgttgggcgatggtcgccttcacgattggccgcaatagcaactggtacagatgacttggagctgcttggtctgcttcagttgttgcttcgtgcatgctctcaggccgtggcagcgacgtgaccactcgcgatgtagctggtgctgctggaggtgccgccaacaaaccaacggatcgtgcaggagaaacagtagcgggtgctgccggtgctcatgtcgctggaagctgctgcggccgaagcgctgctggggtcgcttgtagtggtcgtgttccttgaccactggcgtctgtttgcgatggagatgcgcgtggagccactgtgggctgcgaggtcgacggagagctgcctggcgtcggggtgcggcttcgcaatgggtacggcgagacacgcgtaagaatgggctggcgtggcgacctccgtggtgtggccaccatggtgcaattccag

SEQ ID NO: 23 - DNA, 1687 bp, Phytopthora sojae; identical to SEQ ID NO: 20

SEQ ID NO: 24 - DNA, 1687 bp, Phytopthora sojae; identical to SEQ ID NO: 20

SEQ ID NO: 25 - DNA, 1687 bp, Phytopthora sojae; identical to SEQ ID NO: 20

SEQ ID NO: 26 - DNA, 1686 bp, Phytopthora sojae
cacagtaagaaaaacagagacgacagtgggcccccctgcttaacaccccgcgtaacttgatgtggctgtagtaggaatccgttcaataaaattagtgcgagaggtttgttgtacagaagacgaatccacgagatataccggtctccaaatccgagaactgacaaaataaggaagagatactcccaaatcactctgtcatatgtcttttcaaagtctagaaacagcgccaacgcttcggagtttgaccttgtagcgtgatcccccagtagtcgaacgtggtggtgcagtgatcggccattaacgaatcctttttggtcaggatgtataatggacggtaagacgtcttggaggcggtaggtcagcactttcgacagaatttttacgtctacttgcataagcgtgattggacggtagttgcccggctcactgcgatcacctttagaggagagtaacgcatgacttcctctgggacggcaacaaaattccacggtctagatggtctggtattgtgctttgcaatgattttggcaatatgaggcgagatttgctgtatttatagcgaccacctgctagatttacgataaatcgaggtgcataaatgggtagaggcctagaattacgctaaaagcgccacaattgcacttttgaaagtacaattgtggctgtgcacctgcaattctgtcggcttttatctacaagtacctagacacacgacaattatgcataagagggtaggtgtgctggggatcatggacggcagtgtactgggcggcccaggggcggacccagaaccaaaatctgaggggggccgggccaaaaacaggggggtaagtctatatgcggctcaaaaataggggagtacctcgatccgacagctcagaaataggggggtaagtgtgatgtcttcccaaaatctgggggggggggcggtgccgcctagtttgtatgtaggtccgccccagtctgggccaatgtatggctgctgacaagctctcccaagccgatatatactagccgagcgccgccgctacgcggcggtgattttttagtttgttggcgcttcgctcgctatgctcgctccactattggagcaggctgcctacgcttcgcttggacccgttccgatcgcctcgtcggctcgctgcactactctcgatgtcaggttagtaatacagaggccggggcgggtcctagccgagcgccgccgctacacggcgacgattttttgttagttggcgcttcgctcgcaatgctcactgcgctataagagcaggctgcctacgcttcactacggcagtggcgatcccgttccgctcgcctcgtcggctctctgcactactctcaatgttaggttagtactacagaggttgggcggaccctgcggtcccgcaatatcgtatgatggggtcacctttggcgacggagccgccttcgctgcgctcggcagctactcgtacttagtggaattcgtacttagtgaataagcgtgacgatttgattcggacggacggacagcgcgttgctccaattgatgtttaggattgatgtttaccggaaaagtcgtattgatagagccccaattttctattgcaggttgcgctgtgctctatcattccgataattgtggtagtactgcgacaaggcgaaaattgctataaaacacggtagcatttacatcactttata

SEQ ID NO: 27 - DNA, 1686 bp, Phytopthora sojae
cacagtaagaaaaacagagacgacagtgggcccccctgcttaacaccccgcgtaacttgatgtggctgtagtaggaatccgttcaataaaattagtgcgagaggtttgttgtacagaagacgaatccacgagatataccggtctccaaatccgagaactgacaaaataaggaagagatactcccaaatcactctgtcatatgtcttttcaaagtctagaaacagcgccaacgcttcggagtttgaccttgtagcgtgatcccccagtagtcgaacgtggtggtgcagtgatcggccattaacgaatcctttttggtcaggatgtataatggacggtaagacgtcttggaggcggtaggtcagcactttcgacagaatttttacgtctacttgcataagcgtgattggacggtagttgcccggctcactgcgatcacctttagaggagagtaacgcatgacttcctctgggacggcaacaaaattccacggtctagatggtctggtattgtgctttgcaatgattttggcaatatgaggcgagatttgctgtatttatagcgaccacctgctagatttacgataaatcgaggtgcataaatgggtagaggcctagaattacgctaaaagcgccacaattgcacttttgaaagtacaattgtggctgtgcacctgcaattctgtcggcttttatctacaagtacctagacacacgacaattatgcataagagggtaggygtgctggggatcatggacggcagtgtactgggcggcccaggggcggacccagaaccaaaatctgaggggggccgggccaaaaacaggggggtaagtctatatgcggctcaaaaataggggagtacctcgatccgacagctcagaaataggggggtaagtgtgatgtcttcccaaaatctgggggggggggcggtgccgcctagtttgtatgtaggtccgccccagtctgggccaatgtatggctgctgacaagctctcccaagccgatatatactagccgagcgccgccgctacgcggcggtgattttttagtttgttggcgcttcgctcgctatgctcgctccactattggagcaggctgcctacgcttcgcttggacccgttccgatcgcctcgtcggctcgctgcactactctcgatgtcaggttagtaatacagaggccggggcgggtcctagccgagcgccgccgctacacggcgacgattttttgttagttggcgcttcgctcgcaatgctcactgcgctataagagcaggctgcctacgcttcactacggcagtggcgatcccgttccgctcgcctcgtcggctctctgcactactctcaatgttaggttagtactacagaggttgggcggaccctgcggtcccgcaatatcgtatgatggggtcacctttggcgacggagccgccttcgctgcgctcggcagctactcgtacttagtggaattcgtacttagtgaataagcgtgacgatttgattcggacggacggacagcgcgttgctccaattgatgtttaggattgatgtttaccggaaaagtcgtattgatagagccccaattttctattgcaggttgcgctgtgctctatcattccgataattgtggtagtactgcgacaaggcgaaaattgctataaaacacggtagcatttacatcactttata

SEQ ID NO: 28 - DNA, 1686 bp, Phytopthora sojae; identical to SEQ ID NO: 26

SEQ ID NO: 29 - DNA, 1695 bp, Phytopthora sojae
cacagtaagaaaagcagagacgacagtgggcccccctgcttaacaccccgcgtaacttgatgtggctgtagtaggaatccgttcaataaaattagtgcgagaggtttgttgtacagaagacgaatccacgagatataccggtctccaaatccgagaactgacaaaataaggaagagatactcccaaatcactctgtcatatgtcttttcaaagtctagaaacagcgccaacgcttcggagtttgaccttgtagcgtgatgctgaagatcccccagtagtcgaacgtggtggtgcagtgatcggccattaacgaatcctttttggtcaggatgtataatggacggtaagacgtcttggaggcggtaggtcagcactttcgacagaatttttacgtctacttgcataagcgtgattggacggtagttgcccggctcactgcgatcacctttagaggagagtaacgcatgacttcctctgggacggcaacaaaattccacggtctagatggtctggtattgtgctttgcaatgattttggcaatatgaggcgagatttgctgtatttatagcgaccacctgctagatttacgataaatcgaggtgcataaatgggtagaggcctagaattacgctaaaagcgccacaattgcacttttgaaagtacaattgtggctgtgcagctgcaattctgtcggcttttatctacaagtacctagacacacgacaattatgcataagagggtgggtgtgctggggatcatggacggcagtgtactgggcggcccaggggcggacctagcaccaaaatctgaggggggccgggccaaaaacaggggggtaagtctatatgcggctcaaaaataggggagtacctcgatccgacagctcagaaataggggggkaagtgtgatgtcttcccaaaawckgggggggggggcggtgccgcctagtttgtatgtaggtccgccccagtctgggccaatgtatggctgctgacaagctctcccaagtcgatatatactagccgagcgccgccgctacgcggcggtgattttttagtttgttggcgcttcgctcgctatgctcgctccactattggagcaggctgcctacgcttcacttggacccgttccgatcgcctcgtcggctcgctgcactactctcgatgtcaggttagtaatacagaggccggggcgggtcctagccgagcgccgccgctacacggcgacgattttttgttagttggcgcttcgctcgcaatgctcactgcgctataagagcaggctgcctacgcttcactacggcagtggcggacccgttccgctcgcctcgtcggctctctgcactactctcaatgttaggttagtactacagaggttgggcggaccctgcggtcccgcaatatcgtatgatggggtcacctttggcgacggagccgccttcgctgcgctcggcagctactcgtacttagtggaattcgtacttagtgaataagcgtgacgatttgattcggacggacggacagcgcgttgctccaattgatgtttaggattgatgtttaccggaaaagtcgtattgatagagccccaattttctattgcgggttgcgctgtgctctatcattccgataattgtggtagtactgcgacaaggcgaaaattgctataaaacacggtagcatttacatcactttata

SEQ ID NO: 30 - DNA, 1695 bp, Phytopthora sojae
cacagtaagaaaagcagagacgacagtgggcccccctgcttaacaccccgcgtaacttgatgtggctgtagtaggaatccgttcaataaaattagtgcgagaggtttgttgtacagaagacgaatccacgagatataccggtctccaaatccgagaactgacaaaataaggaagagatactcccaaatcactctgtcatatgtcttttcaaagtctagaaacagcgccaacgcttcggagtttgaccttgtagcgtgatgctgaagatcccccagtagtcgaacgtggtggtgcagtgatcggccattaacgaatcctttttggtcaggatgtataatggacggtaagacgtcttggaggcggtaggtcagcactttcgacagaatttttacgtctacttgcataagcgtgattggacggtagttgcccggctcactgcgatcacctttagaggagagtaacgcatgacttcctctgggacggcaacaaaattccacggtctagatggtctggtattgtgctttgcaatgattttggcaatatgaggcgagatttgctgtatttatagcgaccacctgctagatttacgataaatcgaggtgcataaatgggtagaggcctagaattacgctaaaagcgccacaattgcacttttgaaagtacaattgtggctgtgcagctgcaattctgtcggcttttatctacaagtacctagacacacgacaattatgcataagagggtgggtgtgctggggatcatggacggcagtgtactgggcggcccaggggcggacctagcaccaaaatctgaggggggccgggccaaaaacaggggggtaagtctatatgcggctcaaaaataggggagtacctcgatccgacagctcagaaataggggggtaagtgtgatgtcttcccaaaatctgggggggggggcggtgccgcctagtttgtatgtaggtccgccccagtctgggccaatgtatggctgctgacaagctctcccaagtcgatatatactagccgagcgccgccgctacgcggcggtgattttttagtttgttggcgcttcgctcgctatgctcgctccactattggagcaggctgcctacgcttcacttggacccgttccgatcgcctcgtcggctcgctgcactactctcgatgtcaggttagtaatacagaggccggggcgggtcctagccgagcgccgccgctacacggcgacgattttttgttagttggcgcttcgctcgcaatgctcactgcgctataagagcaggctgcctacgcttcactacggcagtggcggacccgttccgctcgcctcgtcggctctctgcactactctcaatgttaggttagtactacagaggttgggcggaccctgcggtcccgcaatatcgtatgatggggtcacctttggcgacggagccgccttcgctgcgctcggcagctactcgtacttagtggaattcgtacttagtgaataagcgtgacgatttgattcggacggacggacagcgcgttgctccaattgatgtttaggattgatgtttaccggaaaagtcgtattgatagagccccaattttctattgcgggttgcgctgtgctctatcattccgataattgtggtagtactgcgacaaggcgaaaattgctataaaacacggtagcatttacatcactttata

SEQ ID NO: 31 - DNA, 1686 bp, Phytopthora sojae
cacagtaagaaaaacagagacgacagtgggcccccctgcttaacaccccgcgtaacttgatgtggctgtagtaggaatccgttcaataaaattagtgcgagaggtttgttgtacagaagacgaatccacgagatataccggtctccaaatccgagaactgacaaaataaggaagagatactcccaaatcactctgtcatatgtcttttcaaagtctagaaacagcgccaacgcttcggagtttgaccttgtagcgtgatcccccagtagtcgaacgtggtggtgcagtgatcggccattaacgaatcctttttggtcaggatgtataatggacggtaagacgtcttggaggcggtaggtcagcactttcgacagaatttttacgtctacttgcataagcgtgattggacggtagttgcccggctcactgcgatcacctttagaggagagtaacgcatgacttcctctgggacggcaacaaaattccacggtctagatggtctggtattgtgctttgcaatgattttggcaatatgaggcgagatttgctgtatttatagcgaccacctgctagatttacgataaatcgaggtgcataaatgggtagaggcctagaattacgctaaaagcgccacaattgcacttttgaaagtacaattgtggctgtgcacctgcaattctgtcggcttttatctacaagtacctagacacacgacaattatgcataagagggtaggtgtgctggggatcatggacggcagtgtactgggcggcccaggggcggacccagaaccaaaatctgaggggggccgggccaaaaacaggggggtaagtctatatgcggctcaaaaataggggagtacctcgatccgacagctcagaaataggggggtaagtgtgatgtcttcccaaaatctgggggggggggcggtgccgcctagtttgtatgtaggtccgccccagtctgggccaatgtatggctgctgacaagctctcccaagccgatatatactagccgagcgccgccgctacgcggcggtgattttttagtttgttggcgcttcgctcgctatgctcgctccactattggagcaggctgcctacgcttcgcttggacccgttccgatcgcctcgtcggctcgctgcactactctcgatgtcaggttagtaatacagaggccggggcgggtcctagccgagcgccgccgctacacggcgacgattttttgttagttggcgcttcgctcgcaatgctcactgcgctataagagcaggctgcctacgcttcactacggcagtggcgatcccgttccgctcgcctcgtcggctctctgcactactctcaatgttaggttagtactacagaggttgggcggaccctgcggtcccgcaatatcgtatgatggggtcacctttggcgacggagccgccttcgctgcgctcggcagctactcgtacttagtggaattcgtacttagtgaataagcgtgacgatttgattcggacggacggacagcgcgttgctccaatttatgtttaggattgatgtttaccggaaaagtcgtattgatagagccccaattttctattgcaggttgcgctgtgctctatcattccgataattgtggtagtactgcgacaaggcgaaaattgctataaaacacggtagcatttacatcactttata

SEQ ID NO: 32 - DNA, 1809 bp, Phytopthora sojae
tgctacgcgttggatacgtatgcagctacgttttgctgtcctgacccgccccagacccgcatttcgagcatgcattatgttgttttgccagtttatctgagcaacatacactggggtgtcatcattgtcagtatcacgcaccaggctgaaccaccgttaatcacaccctacttctacgagccgctgtgtgatccgcaatatcgagcgactatcgaagatacctacgaagagacggtagcgccatttctgctgggctggcacgagaaaacaatgattggagtggattatcctgttgtggagaatggtgtgtggctggatgcgcctagacagcccgatggaacgtcgtgcggcgttatggtgatagcccaggtgtattgcatgctgaaggataacttccgatttaccaaggccacagtttcagccgatgacgttgccgtcatgcgactacgtattatgtggatgatacttatgcaacctgaagtgagtacaatagcgaaccaagtagccaagaccgtagatgcaaccgacctcgagttgatggcaaccgtaaagacttgaatatagctcaattgtgacctcaaagcagttgtatttgttatcggcttgatgttttctttgtgctcacaacacgcgcgaaatattggtctagtcttgctcgagtagagcctcgaaacactgttgcagcattacgccgtacgacaccacgtagccggtttcacgcacagaccgttgcgagacggacagcttcctccttcacgttggcgagcattgtagccagctcgtcgcgctcgtttaaaagcttgaacgagtacttggcgatcttgtccagtctgtcttccatagcctcaattgccttgagcctagacatcaacagacccttgcaaaccttcgccctgtgagctcgcgatagacgcgtgcctgcgtcggtcgtgggcggtagcggtgagatcggcagagcatcgctgttaaggtcgcctggttccatcttctttcacgcttagtgtgcaccaacagccatttgattctagatgtctgctgtgatattctggagtgcgctcggtaacttttgcagtttccgtaattaatcgcagatagattaccgcaaacccagtcttacatagcaagcaccataccgtgcaggttcggacggctcggacattcggacaatatttaaaactaaatgctattaaatgctccgtgaagtgtggtgcacataaaatcttttgcaatcctctgtcatacagcggctgtttagtggacaacggcttggggactgcggccgacagcagcagctgcagcagcagcaagacgtgcgggatgtaggcgccgtgcgggacggcgggtcgtactgcggctggtcctcgcggggtggcggccgtcgaggccagcagcagcgggctgaggagggcgaggaggtggtggaggtggcggccagcaccagcaagacgtgcgggatgtcggtgccgtgcgggacggcgggtcgtactgcggctggtcctcgggcggggtggcggccgtcgaggccagcagcagcagcagcaggctgaggaggacgaggaggtggtggaggtggaggccaacagcggggtcgacgacatgagagggatgccgacggcggacaggtactgtgacacaaattattgcatgtgccctgtaaaacgtcgtaaaaaagtaattacactaaagtagctcaatggaggagctcccgaaagggtggttgtgggttcgattcccacgtttagtatcctattgctggcccggggcactgggttcctgatgtgtggtagaggcaacaataactcaataatc

SEQ ID NO: 33 - DNA, 1809 bp, Phytopthora sojae; identical to SEQ ID NO: 32

SEQ ID NO: 34 - DNA, 1809 bp, Phytopthora sojae; identical to SEQ ID NO: 32

SEQ ID NO: 35 - DNA, 1809 bp, Phytopthora sojae
tgctacgcgttggatacgtatgcagctacgttttgctgtcctgacccgccccagacccgcatttcgagcatgcattatgttgttttgccagtttatctgagcaacatacactggggtgtcatcattgtcagtatcacgcaccaggctgaaccaccgttaatcacaccctacttctacgagccgctgtgtgatccgcaatatcgagcgactatcgaagatacctacgaagagacggtagcgccatttctgctgggctggcacgagaaaacaatgattggagtggattatcctgttgtggagaatggtgtgtggctggatgcgcctagacagcccgatggaacgtcgtgcggcgttatggtgatagcccaggtgtattgcatgctgaaggataacttccgatttaccaaggccacagtttcagccgatgacgttgccgtcatgcgactacgtattatgtggatgatacttatgcaacctgaagtgagtacaatagcgaaccaagtagccaagaccgtagatgcaaccgacctcgagttgatggcaaccgtaaagacttgaatatagctcaattgtgacctcaaagcagttgtatttgttatcggcttgatgttttctttgtgctcacaacacgcgcgaaatattggtctagtcttgctcgagtagagcctcgaaacactgttgcagcattacgccgtacgacaccacgtagccggtttcacgcacagaccgttgcgagacggacagcttcctccttcacgttggcgagcattgtagccagctcgtcgcgctcgtttaaaagcttgaacgagtacttggcgatcttgtccagtctgtcttccatagcctcaattgccttgagcctagacatcaacagacccttgcaaaccttcgccctgtgagctcgcgatagacgcgtgcctgcgtcggtcgtgggcggtagcggtgagatcggcagagcatcgctgttaaggtcgcctggttccatcttctttcacgcttagtgtgcaccaacagcggtttgattctagatgtctgctgtgatattctggagtgcgctcggtaacttttgcagttttcgtaattaatcgcagatagattaccgcaaacccagtcttacatagcaagcaccataccgtgcaggttcggacggctcggacattcggacaatatttaaaactaaatgctattaaatgctccgtgaagtgtggtgcacataaaatcttttgcaatcctctgtcatacagcggctgtttagtggacaacggcttggggactgcggccgacagcagcagctgcagcagcagcaagacgtgcgggatgtaggcgccgtgcgggacggcgggtcgtactgcggctggtcctcgcggggtggcggccgtcgaggccagcagcagcgggctgaggagggcgaggaggtggtggaggtggcggccagcaccagcaagacgtgcgggatgtcggtgccgtgcgggacggcgggtcgtactgcggctggtcctcgggcggggtggcggccgtcgaggccagcagcagcagcagcaggctgaggaggacgaggaggtggtggaggtggaggccaacagcggggtcgacgacatgagagggatgccgacggcggacaggtactgtgacacaaattattgcatgtgccctgtaaaacgtcgtaaaaaagtaattacactaaagtagctcaatggaggagctcccgaaagggtggttgtgggttcgattcccacctttagtatcctattgctggcccggggcactgggttcctgatgtgtggtagaggcaacaataactcaataatc

SEQ ID NO: 36 - DNA, 1809 bp, Phytopthora sojae; identical to SEQ ID NO: 35

SEQ ID NO: 37 - DNA, 1648 bp, Phytopthora sojae
tgctacgcgttggatacgtatgcagctacgttttgctgtcctgacccgccccagacccgcatttcgagcatgcattatgttgttttgccagtttatctgagcaacatacactggggtgtcatcattgtcagtatcacgcaccaggctgaaccaccgttaatcacaccctacttctacgagccgctgtgtgatccgcaatatcgagcgactatcgaagatacctacgaagagacggtagcgccatttctgctgggctggcacgagaaaacaatgattggagtggattatcctgttgtggagaatggtgtgtggctggatgcgcctagacagcccgatggaacgtcgtgcggcgttatggtgatagcccaggtgtattgcatgctgaaggataacttccgatttaccaaggccacagtttcagccgatgacgttgccgtcatgcgactacgtattatgtggatgatacttatgcaacctgaagtgagtacaatagcgaaccaagtagccaagaccgtagatgcaaccgacctcgagttgatggcaaccgtaaagacttgaatatagctcaattgtgacctcaaagcagttgtatttgttatcggcttgatgttttctttgtgctcacaacacgcgcgaaatattggtctagtcttgctcgagtagagcctcgaaacactgttgcagcattacgccgtacgacaccacgtagccggtttcacgcacagaccgttgcgagacggacagcttcctccttcacgttggcgagcattgtagccagctcgtcgcgctcgtttaaaagcttgaacgagtacttggcgatcttgtccagtctgtcttccatagcctcaattgccttgagcctagacatcaacagacccttgcaaaccttcgccctgtgagctcgcgatagacgcgtgcctgcgtcggtcgtgggcggtagcggtgagatcggcagagcatcgctgttaaggtcgcctggttccatcttctttcacgcttagtgtgcaccaacagcggtttgattctagatgtctgctgtgatattctggagtgcgctcggtaacttttgcagttttcgtaattaatcgcagatagattaccgcaaacccagtcttacatagcaagcaccataccgtgcaggttcggacggctcggacattcggacaatatttaaaactaaatgctattaaatgctccgtgaagtgtggtgcacataaaatcttttgcaatcctctgtcatacagcggctgtttagtggacaacggcttggggactgcggccgacagcagcagctgcagcagcagcaagacgtgcgggatgtaggcgccgtgcgggacggcgggtcgtactgcggctggtcctcgcggggtggcggccgtcgaggccagcagcagcgggctgaggaggrcgaggakgtggtggargtggcggccagcascagcaagacgtgcgggatgtcggygccgtgcgggwcgscgggtcgtactgcggctggtcctcgggcggggtggcggccgtcgaggccagcagcagcagcagcaggctgaggaggacgaggaggtggtggaggtggaggccaacagcggggtcgacgacatgagagggatgccgacggcggacaggtactgtgacacaaattattgcatgt

SEQ ID NO: 38 - DNA, 1809 bp, Artificial sequence
  Consensus sequence or oligonucleotide
  misc_feature (1016)..(1016): n is c or g
  misc_feature (1017)..(1017): n is a or g
  misc_feature (1076)..(1076): n is c or t
tgctacgcgttggatacgtatgcagctacgttttgctgtcctgacccgccccagacccgcatttcgagcatgcattatgttgttttgccagtttatctgagcaacatacactggggtgtcatcattgtcagtatcacgcaccaggctgaaccaccgttaatcacaccctacttctacgagccgctgtgtgatccgcaatatcgagcgactatcgaagatacctacgaagagacggtagcgccatttctgctgggctggcacgagaaaacaatgattggagtggattatcctgttgtggagaatggtgtgtggctggatgcgcctagacagcccgatggaacgtcgtgcggcgttatggtgatagcccaggtgtattgcatgctgaaggataacttccgatttaccaaggccacagtttcagccgatgacgttgccgtcatgcgactacgtattatgtggatgatacttatgcaacctgaagtgagtacaatagcgaaccaagtagccaagaccgtagatgcaaccgacctcgagttgatggcaaccgtaaagacttgaatatagctcaattgtgacctcaaagcagttgtatttgttatcggcttgatgttttctttgtgctcacaacacgcgcgaaatattggtctagtcttgctcgagtagagcctcgaaacactgttgcagcattacgccgtacgacaccacgtagccggtttcacgcacagaccgttgcgagacggacagcttcctccttcacgttggcgagcattgtagccagctcgtcgcgctcgtttaaaagcttgaacgagtacttggcgatcttgtccagtctgtcttccatagcctcaattgccttgagcctagacatcaacagacccttgcaaaccttcgccctgtgagctcgcgatagacgcgtgcctgcgtcggtcgtgggcggtagcggtgagatcggcagagcatcgctgttaaggtcgcctggttccatcttctttcacgcttagtgtgcaccaacagcnntttgattctagatgtctgctgtgatattctggagtgcgctcggtaacttttgcagtttncgtaattaatcgcagatagattaccgcaaacccagtcttacatagcaagcaccataccgtgcaggttcggacggctcggacattcggacaatatttaaaactaaatgctattaaatgctccgtgaagtgtggtgcacataaaatcttttgcaatcctctgtcatacagcggctgtttagtggacaacggcttggggactgcggccgacagcagcagctgcagcagcagcaagacgtgcgggatgtaggcgccgtgcgggacggcgggtcgtactgcggctggtcctcgcggggtggcggccgtcgaggccagcagcagcgggctgaggagggcgaggaggtggtggaggtggcggccagcaccagcaagacgtgcgggatgtcggtgccgtgcgggacggcgggtcgtactgcggctggtcctcgggcggggtggcggccgtcgaggccagcagcagcagcagcaggctgaggaggacgaggaggtggtggaggtggaggccaacagcggggtcgacgacatgagagggatgccgacggcggacaggtactgtgacacaaattattgcatgtgccctgtaaaacgtcgtaaaaaagtaattacactaaagtagctcaatggaggagctcccgaaagggtggttgtgggttcgattcccacgtttagtatcctattgctggcccggggcactgggttcctgatgtgtggtagaggcaacaataactcaataatc

SEQ ID NO: 39 - DNA, 1912 bp, Phytopthora sojae
taatggattaaaggcaacgaagacggcgtatccacattcgtccacaggcgtggcactggagatgagctctcgtcgagtgactgcagatgctgatgggcgctgagcggggtcaatgctgcaatgcgctccggatatctcgaccgtttcggcttgggctcgccaggagctttgcctgcagctcttgcactaggctgcgctgcctcgcttcaacgaagcaaggtctgtgtgtacgtacacttgctccgttgcacgagcgcccgcaccatcggaactgcgtttgaacacccgcgtcaaaattcgctgccggaacgcggtcaaatgtgctgaggatggctgataggcgtctggttgcaggctgcaacttgcagctgggatgatgcttgctaagcgttccactcacctttaacgcaagctgttgcgcaactgcagaggatctcgattagtatgcgccgagcgcgtgaaagctaaagccggcgcgggtgaatcctgcatccactttatacgcgaaactaagatgcatgctcctggaactcgctgtaccgtgcaagtactattgtgaagctaccacgttcttcagttgattggttccatttgccttcactacattgctgtgacttccaaggttagactcgagccgattgcagctcagctggcagcatccaaagtgaataacatctcagactacagtaacgactgctggtctgatacctgcacagctacatgattgaggattgagttgaggccgataacgacttgaaaacgaagagttgatcaccttcgccgatcgtgcggccgccacaaaaaactatttttatttttttattttttaaaagaaaaaaagaaaaaagaaaaagctgaaacttttaagcaattctgtgagatcaaggtggtggcaggaaggaccaagcttactggagtgaagtggaatctagcccgaagtgcgaaacactcgacacgacacttccaggtgaacctgagcaagcagtacatcacacttattgcttttcatccaacgctcatgtattcctatctttcaccgtaataatgcctagctctagttcggcttgcgggcgcgcgctctaaagcgggagagtgacgagaggaaacgatcgtgtctagtgtacgccatcagtgcacgggcaaatgcttcggcgtcgtccgcaacgtaccggtgtagccgttctcacacgtcacatacaaatctgaattaaggtcagctctattttccagaaaatctattccgttctaaaaatattctaagatctgccgccaatcatttgcagaaaatgactcgcgcaccgaacatcctcgtcacgggaacgcccggcacgggcaagacgtccatgtgccagcagctagcggtgcgttctgtcttcaccccgtagctcaccatgtccgcctgcgtcttgcgtatctagtcacccctttctcaccttcaaccgatccctacaacctgtaaaattcctttaggagcgatgccaagtgctgtcccacctgaacgtcggcgacttggtacgtgaatatctcggcttctactgcgagttcggggcccgttcaaggcttcccaagtagctgagacacagcagaatctgactgcaatgtggcgtcgctgtaggtgaaggagcgcgggctgcacagcggtcgcgacgaggagttcgactgcttcgtgctggacgaagacaaggtctgcgacgagatggaggacatgatggccgagggcggcaaggtcgtggacttccacacgtgcgacttcttcccggagcgctggttcgacctggtcgtggtgctgcgcgtggacaacacgacgctcttcgaccgcctgcagaagcgcggctactcggagaagaaggtggcggagaacgtcgagtgcgagatcatggaggtcgtgctgcaggaggcgcgcgagagctac

SEQ ID NO: 40 - DNA, 1912 bp, Phytopthora sojae; identical to SEQ ID NO: 39

SEQ ID NO: 41 - DNA, 1912 bp, Phytopthora sojae
taatggattaaaggcaacgaagacggcgtatccacattcgtccacaggcgtggcactggagatgagctctcgtcgagtgactgcagatgctgatgggcgctgagcggggtcaatgctgcaatgcgctccggatatctcgaccgtttcggcttgggctcgccaggagctttgcctgcagctcttgcactaggctgcgctgcctcgcttcaacgaagcaaggtctgtgtgtacgtacacttgctccgttgcacgagcgcccgcaccatcggaactgcgtttgaacacccgcgtcaaaattcgctgccggaacgcggtcaaatgtgctgaggatggctgataggcgtctggttgcaggctgcaacttgcagctgggatgatgcttgctaagcgttccactcacctttaacgcaagctgttgcgcaactgcagaggatctcgattagtatgcgccaagcgcgtgaaagctaaagccggcgcgggtgaatcctgcatccactttatacgcgaaactaagatgcatgctcctggaactcgctgtaccgtgcaagtactattgtgaagctaccacgttcttcagttgattggttccatttgccttcactacattgctgtgacttccaaggttagactcgagccgattgcagctcagctggcagcatccaaagtgaataacatctcagactacagtaacgactgctggtctgatacctgcacagctacatgattgaggattgagttgaggccgataacgacttgaaaacgaagagttgatcaccttcgccgatcgtgcggccgccacaaaaaactatttttatttttttattttttaaaagaaaaaaagaaaaaagaaaaagctgaaacttttaagcaattctgtgagatcaaggtggtggcaggaaggaccaagcttactggagtgaagtggaatctagcccgaagtgcgaaacactcgacacgacacttccaggtgaacctgagcaagcagtacatcacacttattgcttttcatccaacgctcatgtattcgtatctttcaccgtaataatgcctagctctagttcggcttgcgggcgcgcgctctaaagcgggagagtgacgagaggaaacgatcgtgtctagtgtacgccatcagtgcacgggcaaatgcttcggcgtcgtccgcaacgtaccggtgtagccgttctcacacgtcacatacaaatctgaattaaggtcagctctattttccagaaaatctattccgttctaaaaatattctaaactctgccgccaatcatttgcagaaaatgactcgcgcaccgaacatcctcgtcacgggaacgcccggcacgggcaagacgtccatgtgccagcagctagcggtgcgttctgtcttcaccccgtagctcaccatgtccgcctgcgtcttgcgtatctagtcacccctttctcaccttcaaccgatccctacaacctgtaaaattcctttaggagcgatgccaagtgctgtcccacctgaacgtcggcgacttggtacgtgaatatctcggcttctactgcgagttcggggcccgttcaaggcttcccaagtagctgagacacagcagaatctgactgcaatgtggcgtcgctgtaggtgaaggagcgcgggctgcacagcggtcgcgacgaggagttcgactgcttcgtgctggacgaagacaaggtctgcgacgagatggaggacatgatggccgagggcggcaaggtcgtggacttccacacgtgcgacttcttcccggagcgctggttcgacctggtcgtggtgctgcgcgtggacaacacgacgctcttcgaccgcctgcagaagcgcggctactcggagaagaaggtggcggagaacgtcgagtgcgagatcatggaggtcgtgctgcaggaggcgcgcgagagctac

SEQ ID NO: 42 - DNA, 1912 bp, Phytopthora sojae; identical to SEQ ID NO: 39

SEQ ID NO: 43 - DNA, 1912 bp, Phytopthora sojae; identical to SEQ ID NO: 39

SEQ ID NO: 44 - DNA, 1912 bp, Phytopthora sojae; identical to SEQ ID NO: 39

SEQ ID NO: 45 - DNA, 2440 bp, Phytopthora sojae
ggctacatgtgagagcagcagcagctcgaggagaagatagcaggctgtagttcgtttgatttttagctttggccccacctcaatcgcttttcaactttctccggacttcctaagtctccatcctaccctttcttccgtcgccgtcctcgcgtccgtcgccgcggtgaacttcctctgcatccaagaccttccaatactgtgtcctgcgtaatcatgcccagagcttgcatggcgcagaatggcttgttcaggaagtcttgagcaatctccagccggaagctggaggggtgggtatacgttgcggtggcattttgaaaatgagggcgatgcaaacactatgcactgaaatgattggctggtaggcaaatagttttaacaaatgaaatttagcgttatagttggaaagagttgaacacttcctaaaattggtatgtgagcaccgatctttgcaccgttcacttgacttgcttacagacggattaaatgatcagagctcaaatacactgtaccatatcaccatcagagttgaccgagattgaaggaaatcaggcttggataaagcagttgtggcatctctcgggaagccccctattgttgtgtttgagtcatatacattcgtattttgatgatctgttgttcttgatgagtctagcgcagccataccttcggctacgcgataatgtatctcattaaatgagatacattatcgaaatgaaatgttcatttcgtctgtttcacgccatcactgattcttgtcgatcagaatcaaacaccgaggaggttgccttcgaaaaaaaaaaaacaataatacaatccagagcatgcacatccaaggaaatgatcccttgtcgttctgttgcactggaacaaaagtggcggcgtgcatgctcaagaggaaccaccacaacggagagcacttgtgtccgccgccacccaataacgacatttctcctttcgctctccagccagcaagtcctcaagtcgccaagtatcacgaaccatgcgtctatcttttgtgctttctcttgtcgtggccattggctacgtcgtgacctgcaacgcaactgagtactccgacgaaaccaatatcgccatggtggaatctccagatctcgtccgtcgctcgctcaggaacggcgacattgccggtggaagatttcttcgagctcatgaagaggacgatgcgggggagcggaccttcagcgtgactgacctgtggaacaaggtggcggccaaaaagttggccaaggcgatgctggcggacccttcaaaggagcagaaagcgtacgagaagtgggcaaagaaggggtacagccttaagatcaagaactggttggcaatcgcggaccccaagcagaaggggaagtacgaccgtatctacaacggatacacctttcacctgtatcagagctgagaaggtctcgccgaaatcgcatgcgattcgcgctctgctgttctccattcgaagcgtagaagtagagccgtaaaccgaagatttacaaactaatggttgcgtggtaatacaatgcaaccttagctcccaatacgtcactcccagcctgtgcatgctgactgcccagacccgagtttagcgaatttatttaatttttaattctcaacttggtggtattggcacccaaagtttgacagtcggtttcttatacagacgactacagtactaatatgacacttcacagcgcaagcttaaagttatcttcgtcagtgtcccaacccgcttaaaaacctgtcgttgctcttgttggcccctgtcgcacaaaagagctcgtttgagtcgaatcctccacggaaaagacgacctaaaacctcgtggcaattgtcgacgcacttccactggaatccctagacttcagtacaccctcagcgccgtgctatgggctcgtggatcccgtacgactggatacagtcttgctgtatccagtcgtacggctggctttggcaactctccaatgggaaaaggtcttacccaaatctggaaagatattagaacaaacttgtcgattttccagtgctcttcttagaaaagttctgctgacaccggaaagctgtagactctaagtgtgtttttcggtgtctctatgtgtgtgctggcatgatttcgtataaccgaggccggggtagagacggtagagggaaggtgaaaccagatcccccaaaactgcaatttcggtgcctgtgaagcgagagcgtggcctggagcagtgcgctttaggcccaggcctaggctaggctattcctccctctttccattgagaccaaccccagattcatcgatttcgtgggggattcaaggcattcatttccctggagcactttgaggttttcacgatttgagggccgtgagatctatccccggccggctgtgcaagaccgggaagggccccagtgtttttttcgttgggtgtttttttcggtgtcagta

SEQ ID NO: 46 - DNA, 2440 bp, Phytopthora sojae; identical to SEQ ID NO: 45

SEQ ID NO: 47 - DNA, 2433 bp, Phytopthora sojae
ggctacatgtgagagcagcagcagctcgaggagaagatagcaggctgtagttcgtttgatttttagctttggccccacctcaatcgcttttcaactttctccggacttcctaagtctccatcctaccctttcttccgtcgccgtccgtcgccgcggtgaacttcctctgcatccaagaccttccaatactgtgtcctgcgtaatcatgcccagagcttgcatggcgcagaatggcttgttcaggaagtcttgagcaatctccagccggaagcggttcgtgtggtggaggggtgggtatacgttgcggtggcattttgaaaatgagggcgatgcaaacactatgcactgaaatgattggctggtaggcaaatagttttaacaaatgaaatttagcgttatagttggaaagagttgaacacttcctaaaattggtatgtgagcaccgatctttgcaccgttcacttgacttgcttacagacggattaaatgatcagagctcaaatacactgtaccatatcaccatcagagttgaccgagattgaaggaaatcaggcttggataaagctgttgtggcatctctcgggaagccccctattgttgtgtttgagtcatatacattcgtattttgatgatctgttgttcttgatgagtctagcgcagccataccttcggctacgcgataatgtatctcattaaatgagatacattatcgaaatgaaatgttcatttcgtctgtttcacgccatcactgattcttgtcgatcagaatcaaacaccgaggaggttgccttcgaaaaaaaaaaaacaataatacaatccagagcatgcacatccaaggaaatgatcccttgtcgttctgttgcactggaacaaaagtggcggcgtgcatgctcaagaggaaccaccacaacggagagcacttgtgtccgccgccacccaataacgacatttctcctttcgctctccagccagcaagtcctcaagtcgccaagtatcacgaaccatgcgtctatcttttgtgctttctcttgtcgtggccattggctacgtcgtgacctgcaacgcaactgagtactccgacgaaaccaatatcgccatggtggaatctccagatctcgtccgtcgctcgctcaggaacggcgacattgccggtggaagatttcttcgagctcatgaagaggacgatgcgggggagcggaccttcagcgtgactgacctgtggaacaaggtggcggccaaaaagttggccaaggcgatgctggcggacccttcaaaggagcagaaagcgtacgagaagtgggcaaagaaggggtacagccttaagatcaagaactggttggcaatcgcggaccccaagcagaaggggaagtacgaccgtatctacaacggatacacctttcaccggtatcagagctgagaaggtctcgccgaaatcgcatgcgattcgcgctctgctgttctccattcgaagcgtagaagtagagccgtaaaccgaagatttacaaactaatggttgcgtggtaatacaatgcaaccttagctcccaatacgtcactcccagcctgtgcatgctgactgcccagacccgagtttagcgaatttatttaatttttaattctcaacttggtggtattggcacccaaagtttgacagtcggtttcttatacagacgactacagtactaatatgacacttcacagcgcaagcttaaagttatcttcgtcagtgtcccaacccgcttaaaaacctgtcgttgctcttgttggcccctgtcgcacaaaagagctcgtttgagtcgaatcctccacggaaaagacgacctaaaacctcgtggcaattgtcgacgcacttccactggaatccctagacttcagtacaccctcagcgccgtgctatgggctcgtggatcccgtacgactggatacagtcttgctgtatccagtcgtacggctggctttggcaactctccaatgggaaaaggtcttacccaaatctggaaagatattagaacaaacttgtgtgctcttcttagaaaagttctgctgacaccggaaagctgtagactctaagtgtgtttttcggtgtctctatgtgtgtgctggcatgatttcgtataaccgaggccggggtagagacggtagagggaaggtgaaaccagatcccccaaaactgcaatttcggtgcctgtgaagcgagagcgtggcctggagcagtgcgctttaggcccaggcctaggctaggctattcctccctctttccattgagaccaaccccagattcatcgatttcgtgggggattcaaggcattcatttccctggagcactttgaggttttcacgatttgagggccgtgagatctatccccggccggctgtgcaagaccgggaagggccccagtgtttttttcgttgggtgtttttttcggtgtcagta

SEQ ID NO: 48 - DNA, 2451 bp, Phytopthora sojae
ggctgcatgtgagagcagcagcagctcgaggagaagatagcaggctgtagttcgtttgatttttagctttggccccacctcaatcgcttttcaactttctccggacttcctaagtctccatcctaccctttcttccgtcgccgtcctcgcgtccgtcgccgcggtgaacttcctctgcatccaagaccttccaatactgtgtcctgcgtaatcatgcccagagcttgcatggcgcagaatggcttgttcaggaagtcttgagcaatctccagccggaagcggttcgtgtggtggaggggtgggtatacgttgcggtggcattttgaaaatgagggcgatgcaaacactatgcactgaaatgattggctggtaggcaaatagttttaacaaatgaaatttagcgttatagttggaaagagttgaacacttcctaaaattggtatgtgagcaccgatctttgcaccgttcacttgacttgcttacagacggattaaatgatcagagctcaaatacactgtaccatatcaccatcagagttgaccgagattgaaggaaatcaggcttggataaagcagtygtggcatctctcgggaagccccctattgttgtgtttragtcatatacattcgtattttgatgatctgttgttcttgatgagtctagcgcagccataccttcggctacgcgataatgtatctcattaaatgagatacattatcgaaatgaaatgytcatttcgtctgtttcacgccatcactgattcttgtcgatcagaatcaaacaccgaggaggttgccttcgaaaaaaaaaaaacaataatacaatccagagcatgcacatccaaggaaatgatcccttgtcgttctgttgcactggaacaaaagtggcggcgtgcatgctcaagaggaaccaccacaacggagagcacttgtgtccgccgccacccaataacgacatttctcctttcgctctccagccagcaagtcctcaagtcgccaagtatcacgaaccatgcgtctatcttttgtgctttctcttgtcgtggccattggctacgtcgtgacctgcaacgcaactgagtactccgacgaaaccaatatcgccatggtggaatctccagatctcgtccgtcgctcgctcaggaacggcgacattgccggtggaagatttcttcgagctcatgaagaggacgatgcgggggagcggaccttcagcttgactgacctgtggaacaaggtgggggccaaaacgttggccaaggcgatgctgaaggacccttcaaaggagcaggaagcgtacaagatgtgggcaaagaaaaagtacaccctgcatatcaaggactggttggcaatcgcggaccccaagcagaaggggaagtacgaccgtatctacgacggatacacctttcacctgtatcagagctgagaaggtctcgccgaaatcgcatgcgattcgcgctctgctgttctccattcgaagcgtagaagtagagccgtaaaccgaagatttacaaactaatggttgcgtggtaatacaatgcaaccttagctcccaatacgtcactcccagcctgtgcatgctgactgcccagacccgagtttagcgaatttatttaatttttaattctcaacttggtggtattggcacccaaagtttgacagtcggtttcttatacagacgactacagtactaatatgacacttcacagcgcaagcttaaagttatcttcgtcagtgtcccaacccgcttaaaaacctgtcgttgctcttgttggcccctgtcgcacaaaagagctcgtttgagtcgaatcctccacggaaaagacgacctaaaacctcgtggcaattgtcgacgcacttccactggaatccctagacttcagtacaccctcagcgccgtgctatgggctcgtggatcccgtacgactggatacagtcttgctgtatccagtcgtacggctggctttggcaactctccaatgggaaaaggtcttacccaaacctggaaagatattagaacaaacttgtcgattttccagtgctcttcttagaaaagttctgctgacaccggaaagctgtagactctaagtgtgtttttcggtgtctctatgtgtgtgctggcatgatttcgtataaccgaggccggggtagagacggtagagggaaggtgaaaccagatcccccaaaactgcaatttcggtgcctgtgaagcgagagcgtggcctggagcagtgcgctttaggcccaggcctaggctaggctattcctccctctttccattgagaccaaccccagattcatcgatttcgtgggggattcaaggcattcatttccctggagcactttgaggttttcacgatttgagggccgtgagatctatccccggccggctgtgcaagaccgggaagggccccagtgtttttttcgttgggtgtttttttcggtgtcagta

SEQ ID NO: 49 - DNA, 2451 bp, Artificial sequence
  Consensus sequence or oligonucleotide
ggctacatgtgagagcagcagcagctcgaggagaagatagcaggctgtagttcgtttgatttttagctttggccccacctcaatcgcttttcaactttctccggacttcctaagtctccatcctaccctttcttccgtcgccgtcctcgcgtccgtcgccgcggtgaacttcctctgcatccaagaccttccaatactgtgtcctgcgtaatcatgcccagagcttgcatggcgcagaatggcttgttcaggaagtcttgagcaatctccagccggaagcggttcgtgtggtggaggggtgggtatacgttgcggtggcattttgaaaatgagggcgatgcaaacactatgcactgaaatgattggctggtaggcaaatagttttaacaaatgaaatttagcgttatagttggaaagagttgaacacttcctaaaattggtatgtgagcaccgatctttgcaccgttcacttgacttgcttacagacggattaaatgatcagagctcaaatacactgtaccatatcaccatcagagttgaccgagattgaaggaaatcaggcttggataaagcagttgtggcatctctcgggaagccccctattgttgtgtttgagtcatatacattcgtattttgatgatctgttgttcttgatgagtctagcgcagccataccttcggctacgcgataatgtatctcattaaatgagatacattatcgaaatgaaatgttcatttcgtctgtttcacgccatcactgattcttgtcgatcagaatcaaacaccgaggaggttgccttcgaaaaaaaaaaaacaataatacaatccagagcatgcacatccaaggaaatgatcccttgtcgttctgttgcactggaacaaaagtggcggcgtgcatgctcaagaggaaccaccacaacggagagcacttgtgtccgccgccacccaataacgacatttctcctttcgctctccagccagcaagtcctcaagtcgccaagtatcacgaaccatgcgtctatcttttgtgctttctcttgtcgtggccattggctacgtcgtgacctgcaacgcaactgagtactccgacgaaaccaatatcgccatggtggaatctccagatctcgtccgtcgctcgctcaggaacggcgacattgccggtggaagatttcttcgagctcatgaagaggacgatgcgggggagcggaccttcagcgtgactgacctgtggaacaaggtggcggccaaaaagttggccaaggcgatgctggcggacccttcaaaggagcagaaagcgtacgagaagtgggcaaagaaggggtacagccttaagatcaagaactggttggcaatcgcggaccccaagcagaaggggaagtacgaccgtatctacaacggatacacctttcacctgtatcagagctgagaaggtctcgccgaaatcgcatgcgattcgcgctctgctgttctccattcgaagcgtagaagtagagccgtaaaccgaagatttacaaactaatggttgcgtggtaatacaatgcaaccttagctcccaatacgtcactcccagcctgtgcatgctgactgcccagacccgagtttagcgaatttatttaatttttaattctcaacttggtggtattggcacccaaagtttgacagtcggtttcttatacagacgactacagtactaatatgacacttcacagcgcaagcttaaagttatcttcgtcagtgtcccaacccgcttaaaaacctgtcgttgctcttgttggcccctgtcgcacaaaagagctcgtttgagtcgaatcctccacggaaaagacgacctaaaacctcgtggcaattgtcgacgcacttccactggaatccctagacttcagtacaccctcagcgccgtgctatgggctcgtggatcccgtacgactggatacagtcttgctgtatccagtcgtacggctggctttggcaactctccaatgggaaaaggtcttacccaaatctggaaagatattagaacaaacttgtcgattttccagtgctcttcttagaaaagttctgctgacaccggaaagctgtagactctaagtgtgtttttcggtgtctctatgtgtgtgctggcatgatttcgtataaccgaggccggggtagagacggtagagggaaggtgaaaccagatcccccaaaactgcaatttcggtgcctgtgaagcgagagcgtggcctggagcagtgcgctttaggcccaggcctaggctaggctattcctccctctttccattgagaccaaccccagattcatcgatttcgtgggggattcaaggcattcatttccctggagcactttgaggttttcacgatttgagggccgtgagatctatccccggccggctgtgcaagaccgggaagggccccagtgtttttttcgttgggtgtttttttcggtgtcagta

SEQ ID NO: 50 - DNA, 2470 bp, Phytopthora sojae
ttgaactaccgcgtgcaagggcgggcaaaatgttttcggataaatcatatttaggttcccctctcgagctcggacgccagcggtgctgtcagttgggggcgctgcagaagaagatgatgatgcggcttccgacgaagggtcgacgacgggcgacccctaccaacaaaagcgagcgcgcacggctagcatcgcggagtaagcaaagggtgtgtccttgattctgtctcttttcaatatgtatcaatatgtattgaaaagagacacaatcaaggacacaccctttgcttactccaatatgtatcaatatgtattgaaaagagacagaatcaaggacacaccctttgcttactccgcgatgctagccgtgcgcgctcgcttttgttggtaggggtcgcccgtcgtcgacccttcgtcggaagccgcatcatcatcttcttctgcagcgcccccaactgacagcaccgctggcgtccgagctcgagaggggaacctaaatatgatttatccgaaaacattttgcccgcccttgcacgcggtagttcaaggcatatgttttactaaatattcgtttgtctccttttgaacacgtggaccaatcagtctctttcgatttctgggaaaggacgagaacctattttgcggatttcgagacataatgaaaccaagtgattcttatgctgttctgaacagcatcaggtgattatccaaccctccgcgtccaaggggttaaccccttgaacgcggaggggtgacatggacggcattaaaaaacgcttaaaccgtcccagacagcataagaaataatatgtgtttcagtataccataccgggtagaagaacaaatttggacgtttttcgcacagattgtagctaacctttcaggtaataattcttgcaaggatgatgggcacgaccagtagaacttcttcggcagaagttctggaaccagtagaacttctgccgaagaagtctacttctactggaatcagtagaacttcttcggcagaagttctggaaccagttctactggaaccagtagaacttcttcggcagaagttctggtagttctactggttcctctccccgtaattcaacaatatcaggattgcgtgacttcgtgcaattggctgtgattgggtcacacaaatatccggaacgtgcccatcatccttgcgagaattattacctgaaaggttagctacaatctgtgcgaaaaacgtccaaatttgttcttctactcggtatggtatactgaaacacatattatttcttatgctgtccgggacggtttaagcgttttaaatgacctctccgcgtccaacgggttaatagacatgtacagtatatgtattaccgtcacttgacgaatcacactgtgacggtctccagaccacgatgaccttgaatctcattctgcgtttctccttccagttatcaagagcccgaccaccaagcgacaatgcgcctaaccaacaccctcgtcgtggctgttgctgccatccttctcgcaagcgaaaacgctttttctgcagcaactgatgccgaccaggctaccgtctcgaagtttgcggcagcggagttcgacacgttggtcgatgtcctcaccactgagagcaagagatcccttcgggccacggtcgatgacggcgaagagaggtacaagctgtttaaaatcgaagccttgcaacaaggaaagtggacttcattttttaaaaaatggagctcgaacggccgtactgagtccgacatcaagaaaaagctggcgaatgttaaatggctgtccgaatctgacaaaagtaagattgtcgataattatgtattccacttgagaggtcattagatacatgctccagcggcacgtgcatggagaccgtcggggagttgacactgtgacaagttctcgaatcgtctgtaccagtccgtccttgcaatacacttgagagaaaatgcagacaatcttttcaccttgaacccgtgtttccttcatgtcgttggatcttactttttttttagcagagtggagcagaaaatcttgactataatagccttcttgtacgctcggaacttgtaaacgattctctactgctacgcaaccccgtcgtgaaattttagcggtgcaacctcggagcggtaccatgcatcatgggtccttattagcttatttacgtttgcggttacgacggaggataagggagttctcatgaattgagatagctcttgcttagagcctgttcgcgttgtactagagatggagatggtgcttgatctccacctacagctcgttcgctatgtatccatctccagacaaattttaagccaatcacaggacagatatgggatggctctcctccccacttgagaaaatgccgactcgcctcaccagtgcggccacgcgtgcggcacatgccgctgctcaaggctcgtcggttcctgcgccccccgcacgtcatgacgaaacgccagcgttcgag

SEQ ID NO: 51 - DNA, 2470 bp, Phytopthora sojae
ttgaactaccgcgtgcaagggcgggcaaaatgttttcggataaatcatatttaggttcccctctcgagctcggacgccagcggtgctgtcagttgggggcgctgcagaagaagatgatgatgcggcttccgacgaagggtcgacgacgggcgacccctaccaacaaaagcgagcgcgcacggctagcatcgcggagtaagcaaagggtgtgtccttgattctgtctcttttcaatatgtatcaatatgtattgaaaagagacacaatcaaggacacaccctttgcttactccaatatgtatcaatatgtattgaaaagagacagaatcaaggacacaccctttgcttactccgcgatgctagccgtgcgcgctcgcttttgttggtaggggtcgcccgtcgtcgacccttcgtcggaagccgcatcatcatcttcttctgcagcgcccccaactgacagcaccgctggcgtccgagctcgagaggggaacctaaatatgatttatccgaaaacattttgcccgcccttgcacgcggtagttcaaggcatatgttttactaaatattcgtttgtctccttttgaacacgtggaccaatcagtctctttcgatttctgggaaaggacgagaacctattttgcggatttcgagacataatgaaaccaagtgattcttatgctgttctgaacagcatcaggtgattatccaaccctccgcgtccaaggggttaaccccttgaacgcggaggggtgacatggacggcattaaaaaacgcttaaaccgtcccagacagcataagaaataatatgtgtttcagtataccataccgggtagaagaacaaatttggacgtttttcgcacagattgtagctaacctttcaggtaataattcttgcaaggatgatgggcacgaccagtagaacttcttcggcagaagttctggaaccagtagaacttctgccgaagaagtctacttctactggaatcagtagaacttcttcggcagaagttctggaaccagttctactggaaccagtrgaacttcttcggcagaagttctggtagttctactggttcctctccccgtaattcaacaatatcaggattgcgtgacttcgtgcaattggctgtgattgggtcacacaaatatccggaacgtgcccatcatccttgcgagaattattacctgaaaggttagctacaatctgtgcgaaaaacgtccaaatttgttcttctacycggtatggtatactgaaacacatattattycttatgctgtcygggacggtttaagcgttttaaatgacctctccgcgtccaacgggttaatagacatgtacagtatatgtattaccgkcacttgacgaatcacactgtgacggtctccagaccacgatgaccttgaatctcattctgcgtttctccttccagttatcaagagcccgaccaccaagcgacaatgcgcctaaccaacaccctcgtcgtggctgttgctgccatccttctcgcaagcgaaaacgctttttctgcagcaactgatgccgaccaggctaccgtctcgaagttkgcggcagcggagttcgacacgttggtcgatgtcctcaccactgagagcaagagatcccttcgggccacggtcgatgacggcgaagagaggtacaagctgtttaaaatcgaagccttgcaacaaggaaagtggacttcattttttaaaaaatggagctcgaacggccgtactgagtccgacatcaagaaaaagctggcgaatgttaaatggctgtccgaatctgacaaaagtaagattgtcgataattatgtattccacttgagaggtcattagatacatgctccagcggcacgtgcatggagaccgtcggggagttgacactgtgacaagttctcgaatcgtctgtaccagtccgtccttgcaatacacttgagagaaaatgcagacaatcttttcaccttgaacccgtgtttccttcatgtcgttggatcttactttttttttagcagagtggagcagaaaatcttgactataatagccttcttgtacgctcggaacttgtaaacgattctctactgctacgcaaccccgtcgtgaaattttagcggtgcaacctcggagcggtaccatgcatcatgggtccttattagcttatttacgtttgcggttacgacggaggataagggagttctcatgaattgagatagctcttgcttagagcctgttcgcgttgtactagagatggagatggtgcttgatctccacctacagctcgttcgctaygtatccatctccagacaaattttaagccaatcacaggacagatatgggatggctctcctccccacttgagaaaatgccgactcgcctcaccagtgcggccacgcgtgcggcacatgccgctgctcaaggctcgtcggttcctgcgccccccgcacgtcatgacgaaacgccagcgttcgag

SEQ ID NO: 52 - DNA, 2470 bp, Phytopthora sojae
ttgaactaccgcgtgcaagggcgggcaaaatgttttcggataaatcatatttaggttcccctctcgagctcggacgccagcggtgctgtcagttgggggcgctgcagaagaagatgatgatgcggcttccgacgaagggtcgacgacgggcgacccctaccaacaaaagcgagcgcgcacggctagcatcgcggagtaagcaaagggtgtgtccttgattctgtctcttttcaatatgtatcaatatgtattgaaaagagacacaatcaaggacacaccctttgcttactccaatatgtatcaatatgtattgaaaagagacagaatcaaggacacaccctttgcttactccgcgatgctagccgtgcgcgctcgcttttgttggtaggggtcgcccgtcgtcgacccttcgtcggaagccgcatcatcatcttcttctgcagcgcccccaactgacagcaccgctggcgtccgagctcgagaggggaacctaaatatgatttatccgaaaacattttgcccgcccttgcacgcggtagttcaaggcatatgttttactaaatattcgtttgtctccttttgaacacgtggaccaatcagtctctttcgatttctgggaaaggacgagaacctattttgcggatttcgagacataatgaaaccaagtgattcttatgctgttctgaacagcatcaggtgattatccaaccctccgcgtccaaggggttaaccccttgaacgcggaggggtgacatggacggcattaaaaaacgcttaaaccgtcccagacagcataagaaataatatgtgtttcagtataccataccgggtagaagaacaaatttggacgtttttcgcacagattgtagctaacctttcaggtaataattcttgcaaggatgatgggcacgaccagtagaacttcttcggcagaagttctggaaccagtagaacttctgccgaagaagtctacttctactggaatcagtagaacttcttcggcagaagttctggaagaagttctactggaaccagtggaacttcttcggcagaagttctggtagttctactggttcctctccccgtaattcaacaatatcaggattgcgtgacttcgtgcaattggctgtgattgggtcacacaaatatccggaacgtgcccatcatccttgcgagaattattacctgaaaggttagctacaatctgtgcgaaaaacgtccaaatttgttcttctactcggtatgatatactgaaacacatattatttcttatgctgtccgggacggtttaagcgttttaaatgacctctccgcgtccaacgggttaatagacatgtacagtatatgtattaccgtcacttgacgaatcacactgtgacggtctccagaccacgatgaccttgaatctcattctgcgtttctccttccagttatcaagagcccgaccaccaagcgacaatgcgcctaaccaacaccctcgtcgtggctgttgctgccatccttctcgcaagcgaaaacgctttttctgcagcaactgatgccgaccaggctaccgtttcgaagtttgcggcagcggagttcgacacgttggtcgatgtcctcaccactgagagcaagagatcccttcgggccacggtcgatgacggcgaagagaggtacaagctgtttaaaatcgaagccttgcaacaaggaaagtggacttcattttttaaaaaatggagctcgaacggccgtactgagtccgacatcaagaaaaagctggcgaatgttaaatggctgtccgaatctgacaaaggaaggcttgtcgataattatggattccacttgagaggtcattagatacatgctccagcggcacgtgcatggagaccgtcggggagttgacactgtgacaagttctcgaatcgtctgtaccagtccgtccttgcaatacacttgagagaaaatgcagacaatcttttcaccttgaacccgtgtttccttcatgtcgttggatcttactttttttttagcagagtggagcagaaaatcttgactataatagccttcttgtacgctcggaacttgtaaacgattctctactgctacgcaaccccgtcgtgaaattttagcggtgcaacctcggagcggtaccatgcatcatgggtccttattagcttatttacgtttgcggttacgacggaggataagggagttctcatgaattgagatagctcttgcttagagcctgttcgcgttgtactagagatggagatggtgcttgatctccacctacagctcgttcgctaygtatccatctccagacaaattttaagccaatcacaggacagatatgggatggctctcctccccacttgagaaaatgccgactcgcctcaccagtgcggccacgcgtgcggcacatgccgctgctcaaggctcgtcggttcctgcgccccccgcacgtcatgacgaaacgccagcgttcgag

SEQ ID NO: 53 - DNA, 2470 bp, Phytopthora sojae
ttgaactaccgcgtgcaagggcgggcaaaatgttttcggataaatcatatttaggttcccctctcgagctcggacgccagcggtgctgtcagttgggggcgctgcagaagaagatgatgatgcggcttccgacgaagggtcgacgacgggcgacccctaccaacaaaagcgagcgcgcacggctagcatcgcggagtaagcaaagggtgtgtccttgattctgtctcttttcaatatgtatcaatatgtattgaaaagagacacaatcaaggacacaccctttgcttactccaatatgtatcaatatgtattgaaaagagacagaatcaaggacacaccctttgcttactccgcgatgctagccgtgcgcgctcgctyttgttggtaggggtcgcccgtcgtcgacccttcgtcggaagccgcatcatcatcttcttctgcagcgcccccaactgacagcaccgctggcgtccgagctcgagaggggaacctaaatatgatttatccgaaaacattttgcccgcccttgcacgcggtagttcaaggcatatgttttactaaatawtcgtttgtctccttttgaacacgtggaccaatcagtctctttcgatttctgggaaaggacgagaacctattttgcggatttcgagacataatgaaaccaagtgattcttatgctgttctgaacagcatcaggtgattatccaaccctccgcgtccaaggggttaaccccttgaacgcggaggggtgacatggacggcattaaaaaacgcttaaaccgtcccagacagcataagaaataatatgtgtttcagtataccataccgggtagaagaacaaatttggacgtttttcgcacagattgtagctaacctttcaggtaataattcttgcaaggatgatgggcacgaccagtagaacttcttcggcagaagttctggaaccagtagaacttctgccgaagaagtctacttctactggaatcagtagaacttcttcggcagaagttctggaagaagttctactggaaccagtggaacttcttcggcagaagttctggtagttctactggttcctctccccgtaattcaacaatatcaggattgcgtgacttcgtgcaattggctgtgattgggtcacacaaatatccggaacgtgcccatcatccttgcgagaattattacctgaaaggttagctacaatctgtgcgaaaaacgtccaaatttgttcttctacycggtatgrtatactgaaacacatawtwtttcttatgctgtccgggacggtttaagcgttttaaatgacctctccgcgtccaacgggttaatagacatgtacagtatatgtattaccgkcacttgacgaatcacactgtgacggtctccagaccacgatgaccttgaatctcattctgcgtttctccttccagttatcaagagcccgaccaccaagcgacaatgcgcctaaccaacaccctcgtcgtggctgttgctgccatccttctcgcaagcgaaaacgctttttctgcagcaactgatgccgaccaggctaccgtytcgaagtttgcggcagcggagttcgacacgttggtcgatgtcctcaccactgagagcaagagatcccttcgggccacggtcgatgacggcgaagagaggtacaagctgtttaaaawmgaagccttgcaacaaggaaagtggacttcattttttaamaaatggagckcgarmggccgtwctgagtccgacatcaagaamaagmtggcgaawrttamatggctgwccgaatctgacaaaggaaggcttgtcgataattatggawwcyacttgaraggtyattagatacatgctccagcggcacgtgcatggagaccgtcggggagttgacactgtgacaagttctcgaatcgtctgtaccagtccgtccttgcaatacacttgagagaaaatgcagacaatcttttcaccttgaacccgtgtttccttcatgtcgttggatcttactttttttttagcagagtggagcagaaaatcttgactataatagccttcttgtwcgctcggaacttgtaaacgattctctactgctacgcaaccccgtcgtgaaattttagcggtgcaacctcggagcggtaccatgcatcatgggtccttattagcttatttacgtttgcggttacgacggaggataagggagttctcatgaattgagatagctcttgcttagagcctgttcgcgttgtactagagatggagatggtgcttgatctccacctacagctcgttcgctaygtatccatctccagacaaattttaagccaatcacaggacagatatgggatggctctcctccccacttgagaaaatgccgactcgcctcaccagtgcggccacgcgtgcggcacatgccgctgctcaaggctcgtcggttcctgcgccccccgcacgtcatgacgaaacgccagcgttcgag

SEQ ID NO: 54 - DNA, 2473 bp, Phytopthora sojae
  misc_feature (233)..(346): n is a, c, g, or t
  misc_feature (635)..(1105): n is a, c, g, or t
ttgaactaccgcgtgcaagggcgggcaaaatgttttcggataaatcatatttaggttcccctctcgagctcggacgccagcggtgctgtcagttgggggcgctgcagaagaagaagatgatgatgcggcttccgacgaagggtcgacgacgggcggcccctaccaacaagagcgagcgcgcacggctagcatcgcggagtaagcaaagggggtgtccctgattctgtctcttnnnnnnnnnnnnnnnnnnnnnnnnnnnnnnnnnnnnnnnnnnnnnnnnnnnnnnnnnnnnnnnnnnnnnnnnnnnnnnnnnnnnnnnnnnnnnnnnnnnnnnnnnnnnnnnnnngcttactcctcgatgctagccgttcgcgctcgcttttgtttgtaggggtcgcccgtcgtcgacccttcgtcggaagccgcagcatcatcttcttctgcagcgcccccaactgacagcaccgctggcgtccgagctcgagaggggaacctaaatatgatttatccgaaaacattttgcccgcccttgcacgcggtagttcaaggcatatgttttactaaataatcgtttgtttccttttgaacacgtggaccaatcagtttctttcgatttctgggaaaggacgagaacnnnnnnnnnnnnnnnnnnnnnnnnnnnnnnnnnnnnnnnnnnnnnnnnnnnnnnnnnnnnnnnnnnnnnnnnnnnnnnnnnnnnnnnnnnnnnnnnnnnnnnnnnnnnnnnnnnnnnnnnnnnnnnnnnnnnnnnnnnnnnnnnnnnnnnnnnnnnnnnnnnnnnnnnnnnnnnnnnnnnnnnnnnnnnnnnnnnnnnnnnnnnnnnnnnnnnnnnnnnnnnnnnnnnnnnnnnnnnnnnnnnnnnnnnnnnnnnnnnnnnnnnnnnnnnnnnnnnnnnnnnnnnnnnnnnnnnnnnnnnnnnnnnnnnnnnnnnnnnnnnnnnnnnnnnnnnnnnnnnnnnnnnnnnnnnnnnnnnnnnnnnnnnnnnnnnnnnnnnnnnnnnnnnnnnnnnnnnnnnnnnnnnnnnnnnnnnnnnnnnnnnnnnnnnnnnnnnnnnnnnnnnnnnnnnnnnnnnnnnnnnnnnnnnnnngattgcgtgacttcgtgcaattggctgtgattgggtcacacaaatatccggaacgtgcccatcatccttgcgagaattattacccgaaaggttagctacaatctgtgcgaaaaacgtccaaatttgttcttctacccggtatggtatactgaaacacatawtwtttcttatgctgtccgggacggtttaagcgttttaaatgacctctccgcgtccaacgggttaatagacatgtacagtatatgtattaccgkcacttgacgaatcacactgtgacggtctccagaccacgatgaccttgaatctcattctgcgtttctccttccagttatcaagagcccgaccaccaagcgacaatgcgcctaaccaacaccctcgtcgtggctgttgctgccatccttctcgcaagcgaaaacgctttttctgcagcaactgatgccgaccaggctaccgtctcgaagtttgcggcagcggagttcgacacgttggtcgatgtcctcaccactgagagcaagagatcccttcgggccacggtcgatgacggcgaagagaggtacaagctgtttaaaaaagaagccttgcaacaaggaaagtggacttcattttttaacaaatggagcgcgagaggccgttctgagtccgacatcaagaacaagatggcgaaaattacatggctgaccgaatctgacaaaggaaggcttgtcgataattatggaaactacttgaaaggttattagatacatgctccagcggcacgtgcatggagaccgtcggggagttgacactgtgacaagttctcgaatcgtctgtaccagtccgtccttgcaatacacttgagagaaaatgcagacaatcttttcaccttgaacccgtgtttccttcatgtcgttggatcttactttttttttagcagagtggagcagaaaatcttgactataatagccttcttgtwcgctcggaacttgtaaacgattctctactgctacgcaaccccgtcgtgaaattttagcggtgcaacctcggagcggtaccatgcatcatgggtccttattagcttatttacgtttgcggttacgacggaggataagggagttctcatgaattgagatagctcttgcttagagcctgttcgcgttgtactagagatggagatggtgcttgatctccacctacagctcgttcgctaygtatccatctccagacaaattttaagccaatcacaggacagatatgggatggctctcctccccacttgagaaaatgccgactcgcctcaccagtgcggccacgcgtgcggcacatgccgctgctcaaggctcgtcggttcctgcgccccccgcacgtcatgacgaaacgccagcgttcgag

SEQ ID NO: 55 - DNA, 2473 bp, Phytopthora sojae
  misc_feature (209)..(303): n is a, c, g, or t
  misc_feature (382)..(425): n is a, c, g, or t
  misc_feature (644)..(830): n is a, c, g, or t
  misc_feature (873)..(1106): n is a, c, g, or t
  misc_feature (1290)..(1336): n is a, c, g, or t
  misc_feature (1443)..(1819): n is a, c, g, or t
ttgaactaccgcgtgcaagggcgggcaaaatgttttcggataaatcatatttaggttcccctctcgagctcggacgccagcggtgctgtcagttgggggcgctgcagaagaagaagatgatgatgcggcttccgacgaagggtcgacgacgggcggcccctaccaacaagagcgagcgcgcacggctagcatcgcggagtaagcaaagnnnnnnnnnnnnnnnnnnnnnnnnnnnnnnnnnnnnnnnnnnnnnnnnnnnnnnnnnnnnnnnnnnnnnnnnnnnnnnnnnnnnnnnnnnnnnnntcaatatgtattgaaaagagacagaatcaaggacacaccctttgcttactmcgcgatgctagccgtgcgcgctcgcttnnnnnnnnnnnnnnnnnnnnnnnnnnnnnnnnnnnnnnnnnnnncatcatcttcttcttctgcagcgcccccaactgacagcaccgctggcgtccgagctcgagaggggaacctaaatatgatttatccgaaaacattttgcccgcccttgcacgcggtagttcaaggcatatgttttactaaataatcgtttgtttccttttgaacacgtggaccaatcagtttctttcgatttctgggaaaggacgagaacatattttgcnnnnnnnnnnnnnnnnnnnnnnnnnnnnnnnnnnnnnnnnnnnnnnnnnnnnnnnnnnnnnnnnnnnnnnnnnnnnnnnnnnnnnnnnnnnnnnnnnnnnnnnnnnnnnnnnnnnnnnnnnnnnnnnnnnnnnnnnnnnnnnnnnnnnnnnnnnnnnnnnnnnnnnnnnnnnnnnnnnnnnnnnnnngggtagaagaacaaatttggacgtttttcgcacagattgtagnnnnnnnnnnnnnnnnnnnnnnnnnnnnnnnnnnnnnnnnnnnnnnnnnnnnnnnnnnnnnnnnnnnnnnnnnnnnnnnnnnnnnnnnnnnnnnnnnnnnnnnnnnnnnnnnnnnnnnnnnnnnnnnnnnnnnnnnnnnnnnnnnnnnnnnnnnnnnnnnnnnnnnnnnnnnnnnnnnnnnnnnnnnnnnnnnnnnnnnnnnnnnnnnnnnnnnnnnnnnnnnnnnnnnnnnnnattgcgtgacttcgtgcaattggctgtgattgggtcacacaaatatccggaacgtgcccatcatccttgcgagaattattacccgaaaggttagctacaatctgtgcgaaaaacgtccaaatttgttcttctacccggtatggtatactgaaacacatattatttcttatgctgtccgggacgnnnnnnnnnnnnnnnnnnnnnnnnnnnnnnnnnnnnnnnnnnnnnnnatgtacagtatatgtattaccgtcacttgacgaatcacactgtgacggtctccagaccacgatgaccttgaatctcattctgcgtttctccttccagttatcaagannnnnnnnnnnnnnnnnnnnnnnnnnnnnnnnnnnnnnnnnnnnnnnnnnnnnnnnnnnnnnnnnnnnnnnnnnnnnnnnnnnnnnnnnnnnnnnnnnnnnnnnnnnnnnnnnnnnnnnnnnnnnnnnnnnnnnnnnnnnnnnnnnnnnnnnnnnnnnnnnnnnnnnnnnnnnnnnnnnnnnnnnnnnnnnnnnnnnnnnnnnnnnnnnnnnnnnnnnnnnnnnnnnnnnnnnnnnnnnnnnnnnnnnnnnnnnnnnnnnnnnnnnnnnnnnnnnnnnnnnnnnnnnnnnnnnnnnnnnnnnnnnnnnnnnnnnnnnnnnnnnnnnnnnnnnnnnnnnnnnnnnnnnnnnnnnnnnnnnnnnnnnnnnnnnnnnnnntattccacttgagaggtcattagatacatgctccagcggcacgtgcatggagaccgtcggggagttgacactgtgacaagttctcgaatcgtctgtaccagtccgtccttgcaatacacttgagagaaaatgcagacaatcttttcaccttgaacccgtgtttccttcatgtcgttggatcttactttttttttagcagagtggagcagaaaatcttgactataatagccttcttgtacgctcggaacttgtaaacgattctctactgctacgcaaccccgtcgtgaaattttagcggtgcaacctcggagcggtaccatgcatcatgggtccttattagcttatttacgtttgcggttacgacggaggataagggagttctcatgaattgagatagctcttgcttagagcctgttcgcgttgtactagagatggagatggtgcttgatctccacctacagctcgttcgctaygtatccatctccagacaaattttaagccaatcacaggacagatatgggatggctctcctccccacttgagaaaatgccgactcgcctcaccagtgcggccacgcgtgcggcacatgccgctgctcaaggctcgtcggttcctgcgccccccgcacgtcatgacgaaacgccagcgttcgag

SEQ ID NO: 56 - DNA, 2470 bp, Artificial sequence
  Consensus sequence or oligonucleotide
  misc_feature (945)..(945): n is c or g
  misc_feature (946)..(946): n is c or a
  misc_feature (1356)..(1356): n is t or k
  misc_feature (1817)..(1817): n is t or g
  misc_feature (2289)..(2289): n is t or y
ttgaactaccgcgtgcaagggcgggcaaaatgttttcggataaatcatatttaggttcccctctcgagctcggacgccagcggtgctgtcagttgggggcgctgcagaagaagatgatgatgcggcttccgacgaagggtcgacgacgggcgacccctaccaacaaaagcgagcgcgcacggctagcatcgcggagtaagcaaagggtgtgtccttgattctgtctcttttcaatatgtatcaatatgtattgaaaagagacacaatcaaggacacaccctttgcttactccaatatgtatcaatatgtattgaaaagagacagaatcaaggacacaccctttgcttactccgcgatgctagccgtgcgcgctcgcttttgttggtaggggtcgcccgtcgtcgacccttcgtcggaagccgcatcatcatcttcttctgcagcgcccccaactgacagcaccgctggcgtccgagctcgagaggggaacctaaatatgatttatccgaaaacattttgcccgcccttgcacgcggtagttcaaggcatatgttttactaaatattcgtttgtctccttttgaacacgtggaccaatcagtctctttcgatttctgggaaaggacgagaacctattttgcggatttcgagacataatgaaaccaagtgattcttatgctgttctgaacagcatcaggtgattatccaaccctccgcgtccaaggggttaaccccttgaacgcggaggggtgacatggacggcattaaaaaacgcttaaaccgtcccagacagcataagaaataatatgtgtttcagtataccataccgggtagaagaacaaatttggacgtttttcgcacagattgtagctaacctttcaggtaataattcttgcaaggatgatgggcacgaccagtagaacttcttcggcagaagttctggaannagtagaacttctgccgaagaagtctacttctactggaatcagtagaacttcttcggcagaagttctggaaccagttctactggaaccagtagaacttcttcggcagaagttctggtagttctactggttcctctccccgtaattcaacaatatcaggattgcgtgacttcgtgcaattggctgtgattgggtcacacaaatatccggaacgtgcccatcatccttgcgagaattattacctgaaaggttagctacaatctgtgcgaaaaacgtccaaatttgttcttctactcggtatggtatactgaaacacatattatttcttatgctgtccgggacggtttaagcgttttaaatgacctctccgcgtccaacgggttaatagacatgtacagtatatgtattaccgncacttgacgaatcacactgtgacggtctccagaccacgatgaccttgaatctcattctgcgtttctccttccagttatcaagagcccgaccaccaagcgacaatgcgcctaaccaacaccctcgtcgtggctgttgctgccatccttctcgcaagcgaaaacgctttttctgcagcaactgatgccgaccaggctaccgtctcgaagtttgcggcagcggagttcgacacgttggtcgatgtcctcaccactgagagcaagagatcccttcgggccacggtcgatgacggcgaagagaggtacaagctgtttaaaatcgaagccttgcaacaaggaaagtggacttcattttttaaaaaatggagctcgaacggccgtactgagtccgacatcaagaaaaagctggcgaatgttaaatggctgtccgaatctgacaaaagtaagattgtcgataattatgnattccacttgagaggtcattagatacatgctccagcggcacgtgcatggagaccgtcggggagttgacactgtgacaagttctcgaatcgtctgtaccagtccgtccttgcaatacacttgagagaaaatgcagacaatcttttcaccttgaacccgtgtttccttcatgtcgttggatcttactttttttttagcagagtggagcagaaaatcttgactataatagccttcttgtacgctcggaacttgtaaacgattctctactgctacgcaaccccgtcgtgaaattttagcggtgcaacctcggagcggtaccatgcatcatgggtccttattagcttatttacgtttgcggttacgacggaggataagggagttctcatgaattgagatagctcttgcttagagcctgttcgcgttgtactagagatggagatggtgcttgatctccacctacagctcgttcgctangtatccatctccagacaaattttaagccaatcacaggacagatatgggatggctctcctccccacttgagaaaatgccgactcgcctcaccagtgcggccacgcgtgcggcacatgccgctgctcaaggctcgtcggttcctgcgccccccgcacgtcatgacgaaacgccagcgttcgag

SEQ ID NO: 57 - DNA, 2076 bp, Phytopthora sojae
ggcgcgcgcctgcgacagccgcgtgggcggggcagacccgttcacggtgaagcccgcggcgtggttggccacgcgcatcatctcggcgctgagcccggcgtcgccgtccactggacacgaagcagcgtcgctcgacttggtcttggagtggtccacggggcagccctgcgccgctgctgctgatgcattggatgcaggcgcagcagcggccggcttcttgtggtgcgggtgcgggcacgccgcggcggcggagttcacttcggcggtcatgggtgtgaatgagctcctgctggccgcaggtggcgatgggtatgcgccaccattggtcaactttcggccaataaataatagataggtttcgaagcgactcctcacccttgaaagtgcgaaatgaggacgaaggtgctctggttgggtgcgcataccgttttacagtattactagccgagcgccgccgctacgcggcggtgaatttttagtttgttggcgcttcgctcgctatgctcgctccgctacggcagtggcggacccgttccgctcgcctcgtcggctctctcaatgtcagggccttaggcccagtcttgtatctcgcgggatgcgggatgggaccaatcagagctctttgttgcgggtcgaagcgggacgctttagggacgacaccccttcttgtcccgctgggatgttgtgtggcgcgggcggcaataatagggcttcgcccaattaccctaggcagggcacttcacaaaagtccttggtatgatcctgttactgccaagaaaactgaagagactgacgatgaagcgcgacgtagtccaccgctcagaccaatacgcgcttaactgttccatcacgatttttcgtccacgtagttcatgaactcaaggcgtggacgttttttaatgatctccagctgctgtaataggaaaagacgagctatcgcggcgctattcgactacggtcggtttgtcgttgttagtcacggactggctgcggcgtcgcacacgagcaatgtcctgtacgcgcaccttgagctttgtttagctcaagtaaaagaccgcaggctacagtcactttcgtccaaggcagcgtgagcgataatcctcttctcagaacgtgccgaagaagtggctggatgtgggtgaatattctgcgcgggggagatatccaagctaacgcagctgtaggcgcatcgtttgaccaagtcgatacatctacagctgtggcccacagcctgtgggggcaggtcaaatcgaccatttctgcctgttcaacaacctaaaagaccgcatcaaagaggttgccaaattcgagctttggtcctggaagcttgatcttggacagtgcttctcggatgcgagtctgaggctgctgcagccttttcgctgcaagcgaaaactgaagtatggaaatatttggggcttcgtgcccacgagttcgatggtgcacgaactggcagaagccaatatttacctataccagttataaatcggacgctcgaacacgatttttgaagcgaatctatcgtggtccattttcccaggaggatttaaaggcttcggtaggtggtcggttgaaaacttctatttattatcagctactatgttccagtttcgccgatagtagaacgcagcccagcgatagagcttccccctctatcgcaacctcctttggccggtgtcgtagatgttgcatgaagacctggcgacttgaaacacgcctcgaactaattcatgcggtagtggattttgtacgccttgtagagactcctggggatgtcgtctttgatttttttcgggaggtatccattggccttccatttcgtgaacatctggaagcggagaatcgtatccttgcccatatttgacagagtgttcgcgccgaacaagccgttccgctcttcattgtcgtagttggagagtttggcttcgccatcctccgtgtggtggcttcggagaaatcgcttgtccacgccagcgagaacattcggcgagtgaacggcgtttacgttcgtcacgccagtctcgtcggccttcgatactgcagtgccgcttgcgaggaggacggccgcaagaacaa

SEQ ID NO: 58 - DNA, 2076 bp, Phytopthora sojae; identical to SEQ ID NO: 57

SEQ ID NO: 59 - DNA, 2100 bp, Phytopthora sojae
  misc_feature (699)..(720): n is a, c, g, or t
ggcgcgcgcctgcgacagccgcgtgggcggggcagacccgttcacggtgaagcccgcggcgtggttggccacgcgcatcatctcggcgctgagcccggcgtcgccgtccactggacacgaagcagcgtcgctcgacttggtcttggagtggtccacggggcagccctgcgccgctgctgttgatgcattggatgcaagcgcagcagcggccggcttcttgtggtgcgggtgcgggcacgccgcggcggcggagttcacttcggcggtcatgggtgtgaatgagctcctgctggccgcaggtggcgatgggtatgcgccaccattggtcaactttcggccaataatagataggtttcgaagcgactcctcacccttgaaagtgcgaaatgaggacgaaggtgctctggttgggtgcgcataccgttttacagtattactagccgagcgccgccgctacgcggcggtgaatttttagtttgttggcgcttcgctcgctatgctcgctccgctattggagcagactgcgtacgcttcgctacggcagtggcggacccgttccgctcgcctcgtcggctctctcaatgtcagggccttaggcccagtcttgtatctcgcgggatgcgggatgggaccaatcagagctctttgttgcgggttgaagcgggacgctttagggacgacaccccttcttgtcccgcnnnnnnnnnnnnnnnnnnnnnnggcaataatagggcttcgcccaattaccctaggcagggcacttcacaaaagtccttggtatgatcctgttactgccaagaaaactgaagagactgacgatgaagcgcgacgtagtccaccgctcagaccaatacgcgcttaactgttccatcacgatttttcgtccacgtagttcatgaactcaaggcgtggacgttttttaatgatctccagctgctgtagtaggagaagacgagctatcgcggcgctattcgactacggtcggtttgtcgttgttagtcacggactggctgcggcgtcgcacacgagcaatgtcctgtacgcgcaccttgagctttgtttagctcaagtaaaagaccgcaggctacagtcactttcgyccaaggcagcgtgagcgataatcctcttctcagaacgtgccgaagaagtggctggatgtgggtgaatattctgcgcgggggagatatccaagctaacgcagctgtaggcgcatcgtttgaccaagtcgatacatctacagctgtggcccacagcctgtgggggcaggtcaaatcgaccatttctgcctgttcaacaacctaaaagaccgcatcaaagaggttgccaaattcgagctttggtcctggaagcttgatcttggacagtgcttctcggatgcgagtctgaggctgctgcagccttttcgctgcaagcgaaaactgaagtatggaaatatttggggcttcgtgcccacgagttcgatggtgcacgaactggcagaagccaatatttacctataccagttataaatcggacgctcgaacacgatttttgaagcgaatctatcgtggtccatttttccaggaggatttaaaggcttcggtaggtggtcggttgaaaacttctatttattatcagctaactatgttccagtttccccgatagtagaacgcagcccagcgatagagcttccccctctatcgcaacctcctttggtcggtgtcgtagatgttgcatgaagacctggcgacttggaacacgcctcgaactaattcatgcgatggtggattttgtacgccttgtagagactcctggggatgtcctttttgattgctttcgggaggtgtccattggccttccatttcgtgaacatcttgaagcggaaaatcatatcgttggccatatctgacagagtgcccgcggcgaacaagccgttccgctcttcattgtcgtagttggagagtttggctttgccatcctccgtgtggtggcttcggagaaatcgcttgtccacgccagcgagaacattcggcgagtgaacggcgtttacgttcgtcacgccagtctcgtcggccttcgatactgcagtgccgcttgcgaggaggacggccgcaagaacaa

SEQ ID NO: 60 - DNA, 784 bp, Phytopthora sojae
  misc_feature (634)..(698): n is a, c, g, or t
ggcgcgcgcctgcgacagccgcgtgggcggggcagacccgttcacggtgaagcccgcggcgtggttggccacgcgcatcatctcggcgctgagcccggcgtcgccgtccactggacacgaagcagcgtcgctcgacttggtcttggagtggtccacggggcagccctgcgccgctgctgctgatgcattggatgcaggcgcagcagcggccggcttcttgtggtgcgggtgcgggcacgccgcggcggcggagttcacttcggcggtcatgggtgtgaatgagctcctggtggcgatgggtatgcgccaccattggtcaactttcggccaataataatagataggtttcgaagcggctcctcacccttgaaagtgagaaatgaggacgaaggtgctctagttgggtgcgcataccgttttacagtattactagccgaccgccgccgctacgcggcggtgawtttttagttwgttggcgcttcrctcgctatgctcgctccgctacggcagtggcggacccgttcggctcgcctcgtcggctcgctgcactactctcaatgttagggccttaggcccagtcttgtatctcgcgggatgcgggatgggaccaatcagagctctttgttgcggctcnnnnnnnnnnnnnnnnnnnnnnnnnnnnnnnnnnnnnnnnnnnnnnnnnnnnnnnnnnnnnnnnncaataatagggcttcgcccaattacccaagccagggcacttcacaaaaagtccttggtatgatcctgttactgccaagaaaactga

SEQ ID NO: 61 - DNA, 2079 bp, Phytopthora sojae
atgctcgcaaatgcaaatttaagggttcgggtgctactcgcccgacgaaagtttgcgtgcgatgcgtcatggacctccgtggtgtcgacaagcggctcaacaacttctcgccaaacgtctcgaaaatgctcttagttggtacggactcgacggacgcgaagcgagagcccgctgtggggggttgtgcgttgaaatcggcagattccttcttcaccttctacgaactgggcgcgagcaagaacagtgctgcggacctccaccagctccagatcgttccttcactggcactcaccggcatcgatggtgaactggagaaaaaggcgagctcgtccagttttcgagctactgacagtatcggcggaattggggcaatggtttcggtcggatcgtgggcctccaagcgcacaggcccatcgttctccaccaacccggcccactcaagttcatccggtagacttcgtggtctctcccaactcagccgccgcagctctacgtcgagtggggccgacaagctcgaagagaaggtgaatcttcagagcaacaagatccaccgtgttgtcgccatttaatccagcctttggttgtaacctctatctgcgaacgaagcagccaatgatatctacccagacctcaaagatcttccgcggcttcatgttcgttatgagattcttattgaaataaagcatagctaactgtcgctacttcgggccatttcttctcttaatgctactgctaagttgtaccttcgcgaatgttttgtcgaaagctaatgcgctcgagctcgtttcgcaggagaaagcgagtccttcaatgtaacttcaccgccgaatatcgcccgctctcttccctgaaaaacgccacccatagccttctgagtcatgagttgctgcctccagccacttgcgcatatgatgtgtcgcttagcatcgcggattattactctgcgaggcctcttcctcagagcgtgtatgcaccaaacaaagggtttgttgctgttcttagttttatccaccaccaactgcactcgatcgttttcgcgaagcccctgcaagcgcaactccgcaaaaacgaacagagagtatctgttataaattgaaacgtagtcctgcagtgctttgaaacggtttcatgacaactttaactttcagaaatatgtctgcgcaccacactccgagtaataccagctacaaagtagtaccaatccgactctcgaatgttaaaccgctcctccaaacgaaccgctcagataatcatgatgctgttcagaaacttccggtgctttctgtgatacttcgcgtagtcatcgataacttgaagttttgggtcgtttttaggtagtttcctgacgtcttgaattttgaacaccgtttgtgcgagctgttctggttcgattcgagcgtcatgccacataccaaactgagaattcgtcagtttttgaaccaagctgttcgcatccggagcgtccttcaggcttaggagaagtagtgacaagtcgggtcctccaattttttcatacagaagagcatgtgcgcttgtctcgccaaaccccgactttttcatgtctaaatacgcttttgtgaacttgagccactgtaacatcttcgggttgtcgataaagcggacccctggcatgtcaagacccagcaacttgaacgcggactttgggtccacgtcagccatcagccataacttgttcgccgtattgccagccgtcaacgtcgaagcaaattcgccgagcttggtcaggactgaagggttcatccctctgttttcaatcgaaacgttagcatcgtcgtccacgttcgtagcttgagatcgtagtgatcttgtcgaggttgccatgtcttcagtagccatcatcgatcgcagggataaggtattgcgcccggccgtggcgccttgttcggccgatacgagtgccaaacaggcaccatcggagatggtcgatggccaggaggaacgcacgctgaagaagaaacataattcaggtcgtgtctgttgctcggaggtggcgcaagtgagagcctcgcctccactgccactgaaacaagtgcggatgaggattgcgctccattgcat

SEQ ID NO: 62 - DNA, 2079 bp, Phytopthora sojae; identical to SEQ ID NO: 61

SEQ ID NO: 63 - DNA, 2088 bp, Phytopthora sojae
atgctcgcaaatgcaaatttaagggttcgggtgctactcgcccgacgaaagtttgcgtgcgatgcgtcatggacctccgtggtgtcgacaagcggctcaacaacttctcgccaaacgtctcgaaaatgctcttagttggtacggactcgacggacgcgaagcgagagcccgctgtggggggttgtgcgttgaaatcggcagattccttcttcaccttctacgaactgggcgcgagcaagaacagtgctgcggacctcaaccagctccagatcgttccttcactggcactcaccggcatcgatggtgaactggagaaaaaggcgagctcgtccagttttcgagctactgacagtatcggcggaattggggcaatggtttcggtcggatcgtgggcctccaagcgcacaggcccatcgttctccaccaacccggcccactcaagttcatccggtagacttcgtggtctctcccaactcagccgccgcagctctacgtcgagtggggccgacaagctcgaagagaaggtgaatcttcagagcaacaagatccaccgtgttgtcgccatttaatccagcctttggttgtaacctctatctgcgaacgaagcagccaatgatatctacccagacctcaaagatcttccgcggcttcatgttcgttatgagattcttattgaaataaagcatagctaactgtcgctacttcgggccatttcttctcttaatgctactgctaagttgtaccttcgcgaatgttttgtcgaaagctaatgcgctcgagctcgtttcgcaggagaaagcgagtccttcaatgtaacttcaccgccgaatatcgcccgctctcttccctgaaaaacgccacccatagccttctgagtcatgagttgctgcctccagccacttgcgcatatgatgtgtcgcttagcatcgcggattattactctgcgaggcctcttcctcagagcgtgtatgcaccaaacaaagggtttgttgctgttcttagttttatccaccaccaactgcactcgatcgttttcgcgaagcccctgcaagcgcaactcccgcaaaaacgaacagagagtatctgttataaattgaaacgtagtcctgcagtgctttgaaacggtttcatgacaactttaactttcagaaatatgtctgcgcaccacactccgagtaataccagctacaaagtagtaccaatccgactctcgaatgttaaaccgctcctccaaacgaaccgctcagataatcatgatgctgttcagaaacttccggtgctctctgtgatacttcgcgtagtcatcgataacttgaagttttgggtcgtttttaggtagtttcctgacgtcttcaattttgaacaccgtttgtgcgagctgttctggttcgattcgagcgtcatgccacataccaaactgagaattcgtcagttttttaaccaagctgttcgcatccggagcgtccttcaggcttaggagaagtagtgacaagtcgggtcctccaattttgtcatacagaagagcatgtgcgcttgtctcgccaaaccccgactttttcatgtctaaatacgcttttgtgaacttgagccactgtaacatcttcgggttgtcgataaagcggacccctggcatgtcaagacccagcaacttgaacgcggactttgggtccacgtcagccatcagccataacttgttcgccgtattgccagccgtcaacgtcgaagcaaattcgccgagcttggtcaggactgaagggttcatccctctgttttcaatcgaaacgttagcatcgtcgtccacgttcgtagcttgagatcgtagtgatcttgtcgaggttgccatgtcttcagtagccatcatcgatcgcagggataaggtattgcgcccggccgtggcgccttgttcggccgatacgagtgccaaacaggcaccatcggagatggtaagtagcacgatggccaggaggaacgcacgctgaagaagaaacataattcaggtcgtgtcttttgctcgaaggttgcgcaagtgagagccttgcctccactgccactgaaacaagtgcggatgaggattgcgctccattgcat

SEQ ID NO: 64 - DNA, 2087 bp, Phytopthora sojae
atgctcgcaaatgcaaatttaagggttcgggtgctactcgcccgacgaaagtttgcgtgcgatgcgtcatggacctccgtggtgtcgacaagcggctcaacaacttctcgccaaacgtctcgaaaatgctcttagttggtacggactcgacggacgcgaagcgagagcccgctgtggggggttgtgcgttgaaatcggcagattccttcttcaccttctacgaactgggcgcgagcaagaacagtgctgcggacctccaccagctccagatcgttccttcactggcactcaccggcatcgatggtgaactggagaaaaaggcgagctcgtccagttttcgagctactgacagtatcggcggaattggggcaatggtttcggtcggatcgtgggcctccaagcgcacaggcccatcgttctccaccaacccggcccactcaagttcatccggtagacttcgtggtctctcccaactcagccgccgcagctctacgtcgagtggggccgacaagctcgaagagaaggtgaatcttcagagcaacaagatccaccgtgttgtcgccatttaatccagcctttggttgtaacctctatctgcgaacgaagcagccaatgatatctacccagacctcaaagatcttccgcggcttcatgttcgttatgagattcttattgaaataaagcatagctaactgtcgctacttcgggccatttcttctcttaatgctactgctaagttgtaccttcgcgaatgttttgtcgaaagctaatgcgctcgagctcgtttcgcaggagaaagcgagtccttcaatgtaacttcaccgccgaatatcgcccgctctcttccctgaaaaacgccacccatagccttctgagtcatgagttgctgcctccagccacttgcgcatatgatgtgtcgcttagcatcgcggattattactctgcgaggcctcttcctcagagcgtgtatgcaccaaacaaagggtttgttgctgttcttagttttatccaccaccaactgcactcgatcgttttcgcgaagcccctgcaagcgcaactccgcaaaaacgaacagagagtatctgttataaattgaaacgtagtcctgcagtgctttgaaacggtttcatgacaactttaactttcagaaatatgtctgcgcaccacactccgagtaataccagctacaaagtagtaccaatccgactctcgaatgttaaaccgctcctccaaacgaaccgctcagataatcatgatgctgttcagaaactcccggtggtttttgtgatacttcgcgtagtcatcgataacttgacgttttgggtcgtttttaggtagtttcctgacgtcttcaattttgaacaccgtttgtgcgagctgttctggttcgattcgagcgtcatgccacataccaaactgagaattcgtcagttttttaaccaagctgttcgcatccggagcgtccttcaggcttaggagaagtagtgacaagtcgggtcctccaattttttcatacagaagagcatgtgcgcttgtctcgccaaaccccgactttttcatgtctaaatacgcttttgtgaacttgaaccactgtaacatcttcgggttgtcgataaagcggacccctggcatgtcaagacccagcaacttgaacgcggactttgggtccacgtcagccatcagccataacttgttcgccgtattgccagccgtcaacgtcgaagcaaattcgccgagcttggtcaggactgaagggttcatccctctgttttcaatcgaaacgttagcatcgtcgtccacgttcgtagcttgagatcgtagtgatcttgtcgaggttgccatgtcttcagtagccatcatcgatcgcagggataaggtattgcgccaggccgtggcgccttgttcggccgatacgagtgccaaacaggcaccatcggagatggtaagtagcacgatggccaggagaaacgcacgctgaagaagaaacataattcaggtcgtgtcttttgctcgaaggttgcgcaagtgagagcctcgcctccactgccactgaaacaagtgcggatgaggattgcgctccattgcat

SEQ ID NO: 65 - DNA, 2704 bp, Phytopthora sojae
ccaatgtatcaccgtcgttagtggaacgctagaagatgtagttcagaagtaacctgagctgaataagtgaccctaaatagtgcgaatgattcgagcggcggttttaattaggatgcttgaattaatcgatagagaactttagttgttggaatatctccgggtttggaacaaggaaaatctggataaaatccagatagattacggataaatttccagcggatgttccaataaccaagtccacgaccctcgttgttccactggaatatatttttagaccaagtcagttttgttcaaaactaaagctctctagtagcggtaaatccattcccaacacattaccgattgtaccggtacttgaaatttgcatgagatcgactctttataccgaaattgtatgacgaaaatcggcacctaagctatatcacggaatcaggatgtatgccttgacaaaaggaattcggtacctgtgcagtaatgtagtacgcatgtgacacaaacaggttcatcatcctgttccgcgttatggacaaacttgtcatcttgtttgcgttatggaaaacgcaaaaaacaaaagcttggtacagatatcgcaaattggatgacgcacccgagtaaggatgtttgcttcaagcaatttgctgtcatcccatttgcgttattccaacaaaggtgcgacacaaaccgtgtcgttgattcgcagtgcgtgtcgaacagaaaaatattgagcaggatcttagacgctatcccggatgttctctaagatttttaacactaatacaattggtgccaaaccagggatatctttgagatcgaagccatatatctacaggtatttgtcgcaattcagtgtccatacagtcatgggatgggatgcaacggggacttggccggctaactgaccccatgcaatgctctggaaagccttctgtctggttgggtgctcactttggaatttcttctccagctctcaagtctccctccacctccaacaatcgtcaagatgcgcctcgctcaagttgtggtcgtcatcgctgcttccttcctggttgccactgacgctctttcgaccacgaacgcaaaccaggccaagatcatcaaaggaacgtcgcccggtggccacagcccacgacttctgagggcctaccaacctgatgatgaaggcgattcccccgaagataggacgctgtcgaaagctcaggtgacaaaaatccttaacaaactaggcaaagatgtcacctgggaccacgtcatgcggaacccggctttgttccaaagataccagaagaaggctaacaagatcattgagaagcaaaaggcagcagcgaaaaacgcgtagccgatcatcaacggcgaccacactccttagttttctctccagaaactggctggccgctcgcgattgccaagtgctaaaacaaaagcaacatgtggaactgcagtacttcagcgcacctcgaggttcgtttactgaaaataaaacgtctatcccacgatcactttgcatacagtaggtattggtgctcgtgtacatcagcaagccacgcaaacgctgtagctgcataccaggcaattcagaagcaaggccacgtcggcttcaggggatcttgttgagtgtgaagaacaaagcgagcagaaagccacaatttcgtggttagctggatgatggtcaaggtaatacttatcgtactacattgccgatacagtaagcagtagcgagaaggcagacagacatgctgtcgcctacagtacaacgctcgggctctgctgttccgttccgctgcacaaaggaaggtgccatttttttaaagattggtgcttgccatgattatttttgttaacgcgaggtaggtattataatctctaacctgataatctcaatagcaatttcgaaaagggctatcgttattttcaggttttcggatggccgagctcgaggcggagcgtgtgagcggcttcaagcgcatcttggtccgcctggacgagggcacgcgccgcaagtactgctgccgcgcgctggaggaggacctgcagcatgtcaagagccgcgtgcgcgtgtgcgcggaggccatggcgcaggcgcggcaggtgcaggacgcgacgcgcaagctgcatgccagtcagcgagcggccgtgtcggctgagctgctgggggcgttagaaacccttcagactcgtttagagacgaccacaagcgcgctcattttgggtcgcgcgcccaaaaatggggcgcaaaatgggcccgaaagtgccgtaaaagagaaaactaatgccccattccaagaggccaagacgcttgcgaggctggcgctgctgagtcaggagctggacgatgtggcgagtcagatgcgacggctggagaagctcatgccgcccaatatggcggagctggacgacaagcagaggaagtggtggaggaagcacgtgcacaaactcggagaccatgtgctggagctgctgacgggacacgagagggagaaccgggctctgttgcgccttgagaagacgctcaagaagatggagaccaagtggccggaactcaagagctggcacgcgtacgtgacagtacttttccttgcaggaggagtggcaactgaaaaaaaaaattaatttttttttaggaatttgcagaagcagattgctgaaaagcaagggtcgaagccggcatcaggagctcctgctgaatcaactgcgaagagcaagaaga

SEQ ID NO: 66 - DNA, 2704 bp, Phytopthora sojae; identical to SEQ ID NO: 65

SEQ ID NO: 67 - DNA, 2736 bp, Phytopthora sojae
ccaatgtatcaccgtcgttagtggaacgctagaagatgcagttcagaagtaacctgagctgaataagtgaccctaaatagtgcgaatgattcgagcggcggttttaattaggatgcttgaattaatcgatagagaactttagttgttggaatatctccgggtttggaacaaggaaaatctggataaaatccagatagattacggataaattaccagcggatgttccaataaccaagtccagtggaacaacacgaccctcgttgttccactggaatatatttttagaccaagtcagttttgttccaaactaaagctctctagtagcggtaaatccattcccagccttcgcgaagccctactgtgtgcaacacattaccgattgtaccggtacttgaaatttgcatgagatcgactctttataccgaaattgtatgacgaaaatcggcacctaagctatatcacggaatcaggatgtatgccttgacaaaaggaattcggtacctgtgcagtaatgtagtatgcatgtgacacaaacaggttcatcatcctgttccgcgttatggacaaacttgtcatcttgtttgcgttatggaaaacgcaaaaaacaaaagcttggtacagtatatcgcaaattggatgacgcacccgagtaaggatgtttgcttcaagcaatttgctgtcatcccatttgcgttattccaaagtagggcagcaaaggtgcgacacaaaccgtgtcgttgattcgcagtgcgtgtcgaacagaaaaatattgagcaggatcttagacgctatcccgatgttctctaagatttttaacactaatacaattggtgccaaaccagggatatctttgagatcgaagccatatatctacaggtatttgtcgcaattcagtgtccatacagtcatgggatgggatgcaacggggacttggccggctaactgaccccatgcaatgctctggaaagccttctgtctggttgggtgctcactttggaatttcttctccagctctcaagtctccctccacctccaacaatcgtcaagatgcgcctcgttcaagttgtggtcgtcaccgctgcttccttcctggttgccactgacgctctttcgaccacgaacgcaaaccaggccaagatcatcaaaggaacgtcgcccggtggccacagcccacgacttctgagggcctaccaacctgatgatgaaggcgattcccccgaagaaaggacgctgccgaattctcaggtggcaaaaatccttaacaaactaggcgtcacctgggacgacgtcctgcgggactcggctttgttcgaaaggtaccaggagaaggctaacaagatcattgagaagcaaaaggcagcagcgaacaacgcgaagaggatcatcaaacgcgaccacactccttagttttctctccagaaactggctggccgctcgcgattgccaagtgctaaaacaaaagcaacatgtgtacttcagcgcacctcgaggttcgtttactgaaaataaaacgtctatcccacgatcactttgcatacagtaggtattggtgctcgtgtacatcagcaagccacgcaaacgctgtagctgcataccaggcaattcagaagcaaggccacgtcggcttcaggggatcttgttgagtgtgaagaacaaagcgagcagaaagccacaatttcgtggttagctggatgatggtcaaggtaatacttatcgtactacattgccgatacagtaagcagtagcgagaaggcagacagacatgctgtcgcctacagtacaacgctcgggctctgctgttccgttccgctgcacaaaggaaggtgccatttttttaaagattggtgcttgccatgattatttttgttaacgcgaggtaggtattataatctctaacctgataatctcaatagcaatttcgaaaagggctatcgttattttcaggttttcggatggccgagctcgaggcgaagcgtgtgagcggcttcaagcgcatcttggtccgcctggacgagggcacgcgccgcaagtactgctgccgcgcgctggaggaggacctgcagcatgtcaagagccgcgtgcgcgtgtgcgcggaggccatggcgcaggcgcggcaggtgcaggacgcgacgcgcaagctgcatgccagtcagcgagcggccgtgtcggctgagctgctgggggcgttagaaacccttcagactcgtttagagacgaccacaagcgcgctcattttgggtcgcgcgcccaaaaatggggcgcaaaatgggcccgaaagtgccgtaaaagagaaaactaatgccccattccaagaggccaagacgcttgcgaggctggcgctgctgagtcaggagctggacgatgtggcgagtcagatgcgacggctggagaagctcatgccgcccaatatggcggagctggacgacaagcagaggaagtggtggaggaagcacgtgcacaaactcggagacsatgtgctggagctgctgacgggacacgagagggagaaccgggctctgttgcgccttgagaagacgctcaagaagatggagaccaagtggccggaactcaagagctggcacgcgtacgtgacagtacttttccttgcaggaggagtggcaactgaaaaaaaaaattaatttttttttaggaatttgcagaagcagattgctgaaaagcaagggtcgaagccggcatcaggagctcctgctgaatcaactgcgaagagcaagaaga

SEQ ID NO: 68 - DNA, 2666 bp, Phytopthora sojae
cttacggttctccttctttttaatcccagcagtggtcgcattgcgtctagctgcgaatttgggatcctcctctaccttagctataaacttgctcttctcagcctcgaagctgttaggacgccatactctaccttccatggcgcaaaacgctggcagcactctttcccatgctggcctagtccccttggccacagcaacagcggcctgcatagcataacggtgtgcaaacagtcgatcttgcttcaaaattacgacattacctgcgattgcgacccacttctcttcgtccagcgtcttggcttcataggcgagagtaacagtgtgaaagaccaaatggttgacgaacacgacgcccccaggactcggttcatcgagttctcggttttccccacgcggatggatcgagcgtccttcatcgcgcggaaaaacacccaaatcttgaatgctttttgctgacaaggaggcaagtacgctaccgttctgccgtggtccacgtgcatgggtgtctctcggcaaccaacttgtagccaaatctcatgcggaaatacgtgcgcctccgaagacgacattcgaatcttagagtagtagcctggtatgcttacaacgcactgatcattgggaccctcggcatcttcgtcgatggcagcttgggtggcgtccttaatgatttccacaatgcttgtgcccttgttcagcttcaactcggcccgcacatggctgcttgacactggaaattgatccgccctacgatatcctgccacagcgttgcttgcgcccctaaagacaagcactgcagctttagcagcaattgccacatccatggagaatgaggagtcaacgtagaggtcacggaactcgtgcagcttcttcaaaacttcttccctgttaatggttttaccacaataatcagcttcttgaactaattgttttagcttcgcaatgaacggtccatcggccggcatcgtttctccaacccgccgctgctgacctgctgtagttagtcgtgctgcatactcttggtctcggcggggcgctggagctgctgttggcgctgctggttgctgctcgtgtgacggtgcgttggctaggaccagtaattttattgttagtgtggaccacagtgaacaaaagtatgcatcaggctgcgtctctttttttctgtctattggtggcccacgtgcgtgtatattgctgacctaactggtgtatattgacgacctttactcctacctaatgcacctaaacagtgctgaaaaagccagtcatttagcaaagagcgagcaggatgccacgatcccccggccagcgccaaggcagggcgcggacttccggcacggggaaggcgcttgccgaagaagatcctgactgggagttactgtttcagctggttacagatttcagcatgcagcgtcgtgtactggccgatgcttcggttgatgaccctgctcgcgatattgacacgctggctgccgacgagagagaagcttagataatttcatgaatacacaaattcatgaatacacctacatgtattgccacttgcaaatactttgtcctctaaaataatatgagtggacacgagataggcgagggctgttttagctttgtgctttggtggaggccgcttttaggcccagaagctcggtttgaccagtctagaatggcatttctgcgtttccaagccgcagaaaagcgttttggtcgggagcacagagcctcaagcttggatgttagaccgtactggcgatacgtgtaaatcagacctaggtctgaattaagagctgactggattaaaatcgagattattaacgagataataagcgtgcgttagccaaaatatctgcaaacggcaatacgtcgttgcatttgcattaaacagtttttttctgcgcgcttaccctgtgtatctcgtgtacacctagggtatcacgtaggaaatctcaaattcggtatacctaccatatttagttataatgggggtggtacaaaatgggaatgagtactttcctacctcgatcatcaatcacttcatacaaacttttcataaagacttcgcccgtctccaaaatggctcctttttcggcaaccccattataactaaacccccacaacaactaaataaatacggtaaatgttataggtgccctgcagcttgtccgacatgtacatcgttcatcatccgtacgttttggagttggctcgcctgttctcatcaatgccgtcgatcgtagcaattccttactccgttttctggtgtgtacagtatcgggtcgtaaacacatgcgtaaacacatgcgtaatgcgatacggcgcggtgtctcagaaccacccgccgattttgtactgacagcgtaccattgacctgtagagcccacccagatcataattaatcttccaataagcaagcgccctgcaattccaagtccaacgatgggcctccacaagggcttcttcgtcgcagttgctctcctcgctctcctcattgttgccgctccagctgatgcgatcacagatgagtctcagccccgcgatgcaaccatcgtcgatgccccactcactggcaggggtgccaatgctcggtatttacggactagcacatcgatcatcaaggcccccgacgcccagctaccgagtacaaaggctgcgatcgcatcgtctgtcaccaa

SEQ ID NO: 69 - DNA, 2666 bp, Phytopthora sojae; identical to SEQ ID NO: 68

SEQ ID NO: 70 - DNA, 2651 bp, Phytopthora sojae
cttacggttctcgttctttttaatcccaacaatggtcgcattgcgtctagctgcgaatttgggatcctcctctagcttagctataaacttgctcttctcagcctcgaagctgttaggacgccatactctaccttccatggcgcaaaacgctggcagcactctttcccatgctggcctagtccccttggccacagcaacagcggcctgcatagcataacggtgtgcaaacagtcgatcttgcttcaaaattacacattacctgcgattgcgacccacttctcttcgtccagcgtcttggcttcataggcgagagtaacagtgtgatagaccaaatggttgacgaacacgacgcccccaggactcggttcatcgagttctcggttttccccacgcggatggatcgagcgtccttcatcgcgcggaaaaacacccaaatcttgaatgctttttgctgacaaggaggcaggtacgctaccgttctgccgtggtccacgtgcatgggtgtctctcggcaaccaacttgtagccaaatctcatgcggaaatacgtgcgcctccgaagacgacattcgaatcttagagtagtagcctggtatgcttacaacgcactgatcattgggaccctcggcatcttcgtcgatggcagcttgggtggcgtccttaatgatttccacaatgcttgtgcccttgttcagcttcaactcggcccgcacatggctgcttgacactggaaattgatccgccctacgatatcctgccacagcgttgcttgcgcccctaaagacaagcactgcagctttagcagcaattgccacatccatggagaatgaggagtcaacgtagaggtcacggaactcgtgcagcttcttcaaaacttcttccctgttaatggttttaccacaataatcagcttcttgaactaattgttttagcttcgcaatgaacggtccatcggccggcatcgtttctccaacccgccgctgctgacctgctgtagttagtcgtgctgcatactcttggtctcggcggggcgctggagccgctgttggcgctgctggttgctgctcgtgtgacggtgcgttggctaggaccagtaattttattgttagtgtggaccacagtgaacaaaagtatgcatcaggctgcgtctctttttttctgtctattggtggcccacgtgcgtgtatattgctgacctaactggtgtatattgacggcctttactcctacctaatgcacctaaacagtgctgaaaaagccagtcatttagcaaagagcgagcaggatgccacgatcccccggccagcgccaaggcagggcgcggacttccggcacggggaaggcgcttgccgaagaagatcctgactgggagttactgtttcagctggttacagatttcagcatgcagcgtcgtgtactggccgatgcttcggttgatgaccctgctcgcgatattgacacgctggctgccgacgagagagaagcttagataatttcatgaatacacaaattcatgaatacacctacatgtattgccacttgcaaatactttgtcctctaaaataataggagtggacacgagataggcgaaggctgttttagctttgtgctttggtggaggccgcttttaggcccagaagctcggtttgaccagtctagaatggcatttctgcgtttccaagccgcagaaaagcgttttggtcgggagcacagatgttagaccgtactggcgatacgtgtaaatcagacctaggtctgaattaagagctgactggattaaaatcgagattattaacgagataataagcgtgcgttagccaaaatatctgcaaacggcaatacgtcgttgcatttgcattaaacagtttttttctgcgcgcttaccctgtgtatctcgtgtacacctagggtatcacgtaggaaatctcaaattcggtatacctaccatatttagttataatgggggtggtacaaaatgggaatgagtactttcctacctcgatcatcaatcacttcatacaaacttttcataaagacttcgcccgtctccaaaatggctcctttttcggcaaccccattataactaaacccccacaacaactaaataaatacggtaaatgttataggtgccctgcagcttgtccgacatgtacatcgttcatcatccgtacgttttggagttggctcgcctgttctcatcaatgccgtcgatcgtagcaattccttactccgttttctggtgtgtacagtatcgggtcgtaaacacatgcgtaaacacatgcgtaatgcgatacggcgcggtgtctcagaaccacccgccgattttgtactgacagcgtaccattgacctgtagagcccacccagatcataattaatcttccagtaagcaagcgccctgcaattccaagtccaatgatgggcctccacaagggcttcttcgtcgcagttgctctcctcgctctcctcattgttgccgctccagctgatgcgatcacagatgagtctcagccccgcgatgcaaccatcgtcgatgccccactcactggcaggggtgccaatgctcggtatttacggactagcacatcgatcatcaaggcccccgacgcccagctaccgagtacaaaggctgcgatcgcatcgtctgtcaccaa

SEQ ID NO: 71 - DNA, 23 bp, Artificial sequence
  Consensus sequence or oligonucleotide
gaaagtggacggatattttcaac

SEQ ID NO: 72 - DNA, 20 bp, Artificial sequence
  Consensus sequence or oligonucleotide
caaggacggactggtacaga

SEQ ID NO: 73 - DNA, 21 bp, Artificial sequence
  Consensus sequence or oligonucleotide
cttagtgtgcaccaacagcca

SEQ ID NO: 74 - DNA, 20 bp, Artificial sequence
  Consensus sequence or oligonucleotide
accacacttcacggagcatt

SEQ ID NO: 75 - DNA, 20 bp, Artificial sequence
  Consensus sequence or oligonucleotide
gcttttcatccaacgctcat

SEQ ID NO: 76 - DNA, 18 bp, Artificial sequence
  Consensus sequence or oligonucleotide
aatgattggcggcagatc

SEQ ID NO: 77 - DNA, 21 bp, Artificial sequence
  Consensus sequence or oligonucleotide
aaggggtacagcctggataag

SEQ ID NO: 78 - DNA, 20 bp, Artificial sequence
  Consensus sequence or oligonucleotide
cttgcgctgtgaagtgtcat

SEQ ID NO: 79 - DNA, 19 bp, Artificial sequence
  Consensus sequence or oligonucleotide
cggcagaagttctggaaga

SEQ ID NO: 80 - DNA, 20 bp, Artificial sequence
  Consensus sequence or oligonucleotide
gccttcctttgtcagattcg

SEQ ID NO: 81 - DNA, 20 bp, Artificial sequence
  Consensus sequence or oligonucleotide
cacgagcaatgtcctgtacg

SEQ ID NO: 82 - DNA, 22 bp, Artificial sequence
  Consensus sequence or oligonucleotide
cgagcgtccgatttataactgg

SEQ ID NO: 83 - DNA, 21 bp, Artificial sequence
  Consensus sequence or oligonucleotide
ctgttcagaaacttccggtgc

SEQ ID NO: 84 - DNA, 20 bp, Artificial sequence
  Consensus sequence or oligonucleotide
catgaaaaagtcggggtttg

SEQ ID NO: 85 - DNA, 20 bp, Artificial sequence
  Consensus sequence or oligonucleotide
ctaggcaaagatgtcacctg

SEQ ID NO: 86 - DNA, 20 bp, Artificial sequence
  Consensus sequence or oligonucleotide
atcatggcaagcaccaatct

SEQ ID NO: 87 - DNA, 20 bp, Artificial sequence
  Consensus sequence or oligonucleotide
gtcgtgctgcatactcttgg

SEQ ID NO: 88 - DNA, 20 bp, Artificial sequence
  Consensus sequence or oligonucleotide
caagcttgaggctctgtgct

SEQ ID NO: 89 - DNA, 15 bp, Phytopthora sojae
agagcctcaagcttg

SEQ ID NO: 90 - DNA, 14 bp, Phytopthora sojae
gagcctcaagcttg

SEQ ID NO: 91 - DNA, 7609242 bp, Phytopthora sojae (residues 1-1,902,311 of 7,609,242)
  misc_feature (40911)..(42413): n is a, c, g, or t
  misc_feature (44154)..(44253): n is a, c, g, or t
  misc_feature (1018625)..(1034984): n is a, c, g, or t
  misc_feature (1036211)..(1039539): n is a, c, g, or t
  misc_feature (1043630)..(1045157): n is a, c, g, or t
  misc_feature (1052050)..(1052243): n is a, c, g, or t
  misc_feature (1057205)..(1060318): n is a, c, g, or t
  misc_feature (1068672)..(1069727): n is a, c, g, or t
  misc_feature (1070516)..(1074243): n is a, c, g, or t
  misc_feature (1086719)..(1089539): n is a, c, g, or t
  misc_feature (1136080)..(1137066): n is a, c, g, or t
  misc_feature (1137866)..(1142586): n is a, c, g, or t
  misc_feature (1207052)..(1207151): n is a, c, g, or t
  misc_feature (1318525)..(1319078): n is a, c, g, or t
  misc_feature (1330827)..(1331903): n is a, c, g, or t
  misc_feature (1337551)..(1343863): n is a, c, g, or t
  misc_feature (1346839)..(1359455): n is a, c, g, or t
  misc_feature (1364269)..(1364817): n is a, c, g, or t
  misc_feature (1369478)..(1369597): n is a, c, g, or t
  misc_feature (1373964)..(1373964): n is a, c, g, or t
  misc_feature (1377891)..(1378181): n is a, c, g, or t
  misc_feature (1381005)..(1381104): n is a, c, g, or t
  misc_feature (1716272)..(1716371): n is a, c, g, or t
  misc_feature (1898378)..(1900994): n is a, c, g, or t
  misc_feature (1902632)..(1903384): n is a, c, g, or t
  misc_feature (1923874)..(1924225): n is a, c, g, or t
  misc_feature (2013417)..(2013516): n is a, c, g, or t
  misc_feature (3074820)..(3074919): n is a, c, g, or t
  misc_feature (3655456)..(3655555): n is a, c, g, or t
  misc_feature (4084570)..(4084669): n is a, c, g, or t
  misc_feature (4283405)..(4283504): n is a, c, g, or t
  misc_feature (4298420)..(4309139): n is a, c, g, or t
  misc_feature (4312980)..(4313133): n is a, c, g, or t
  misc_feature (4329460)..(4329559): n is a, c, g, or t
  misc_feature (4361465)..(4361564): n is a, c, g, or t
  misc_feature (4707429)..(4707528): n is a, c, g, or t
  misc_feature (6047486)..(6047954): n is a, c, g, or t
  misc_feature (6710239)..(6710338): n is a, c, g, or t
  misc_feature (7149083)..(7149182): n is a, c, g, or t
tttgactttcgggtaagtatcgatgcacgaacggttgtggcaattttactatttgtgctaaatttaacgggagagtttgtgggaggacgctatataatcgcctgagggctatctagcagccatacccaccggtaaatattgttattcctgtataactagtcggactcagattattaattaacacatgctatttttgaattcatactaattacatgtactgtaaacgcagtactgctttagaaaggttggaaattgtgttgcatacacgattttagtgtgtaccacaaatgtatgcgagtggtgagacaaaagttcagaacacgatgtaacaactttgttgaaccaataggctgcacgcaacacattttcactctggacgagaacaacacaagagaagtatccgagccccacacctcacaccccaaccagctaggcgacagttaagctattgaccacctcgcctgctacatataattggtatttcggcgctaacaaacctatcgctcttttactgtgactggacgattgtgaatcctgggtggaagtactggggcatatattcaacctcaacggtggattagtggcagttgaaggcactagtgtttcggaggccgtggtgcggcaataccgcataaaggagttgatatactctgtgtgagttttcgtacgagtttcggtggagtttggagttggcataggtggtgttgtctcgtattacgttgtggtgagggttttctggaggcgacgtggtggttgtggcgtgggaaggtggcacatcatgccacagtcagagatcacaaatggtgggttgtttacgtgcggaaaatgctcatgtgagttggcctcgcaagaagcacgacgatatcacgtgtgcaataagcaccaagaagtcgcaaagtgtgtggtttacgatgtaggtaaccatcctattacgtacttggtcaaacgcgttgaaggtgtattcaaatgcccacaatgcaaatatttctcgagcgatcccaaacttttgcgccaacacaccaagtcgtgcaagaattcaccgcaaaatgatcgaaacttatcggcgaacatgtgcaaccctgctacaatggtacatgagattgggattgagtacaacaggaagcttggagtagttatatgtgatatatgtcgctacgtactatctcctggtgtaaaggaagtggctattcactttaaacgagttcacgatatgacctttccggtctaactattggagaaaaatttgaagtactttcgttggcgacagaagcatctcttctgaagtatctaaacccaacgcaggagctattggagcgagtagacggaattgagataaaatccggtgtgcgatgtctccattgcgcatacttctgcccacttgatgacacaatgtcgaggcatctaaggtcgaagcataaagacttcaccacggacgtatcgcaacttcagtgcttggtgcaatcactttattcgggtgcaaagacaaaatatttcggcgtacaaggtggtgccagtttctcaacgcatgcagacgattcagatgcagtgggccgtgctctaagtgaattttcacgatctcatttgcatattgctcccacggatgatcgcctcgtaccacctttccttcgccggatgacgtggtacgaggttgttcgtacatattgcacggataaagtttctgaagtcgtcacctcggttaaatttgatcccaactcaaactttgttgagttagtatttccggttgtgtgtcggtattgggagctcaaccaagaaattattggcacccgagagtatttgtttgagcgcattctgtcgtcaaaaggaagtgacattgaaccagcatcggctttgcgacgcattcaatcaaattccgaaaagtactgcaaggccactgcagatggttaacacacatgcccagcactacattattaccccaagctcttctacagatgatgatctggctgatcaagtggggtctctgttccaatcgtgctctgaagctttcgcgtcgatccccactgagcactacagagcggaacatgttcgtgtcgagcaacttgtattgctagatggtgcccttgaaaagatttttcggattgatttggaaaatgaacactccccgagcgagtttcatgcatttccaactcatcgatttattgtatgctcttctatcagtggtccgacaaaagatgctgctggctacgtacagtttaaacaacctggtcaagtgactagtttagacgctatcttaaagtatggagctcgaattgctgctctgatgaaccttcatcagctgtcgtggggtgtggaagccaacgagcaaaatttggcgacgcgaaaaagggcggaggcgctacgtttttatcttaggaccgggatcgaactccttttaatctgctgcaggaggttataagttttggctcaagcatcgccatggcacctgagcaacggcgaattcctcaaatcatgtggctgggatcggcgcatgatgcgcttctagttgaaggccgtcgtgttaccttgaagacgcttcacgacttaaaagcgaagcttgtcgaccagtttggtaaggtgcttcgtgaaaatgtgcttttgggctacgatatatctgctgttgaaaaacatttaatgtcggatgagcagtgctgttacgacgactaccgcaattatagctgtggatacagctttctcgaagacgacaggaatccatggaaatcgatgcgtatgcatcttgttaagtatcttcttcagactcatcgctccaagtttatcgtcaaggtggtgaatggtaaaatcacatttggacttgcttcgctgtcccagtggtacaaaaaggttgataaactcacgaagcttcttgcacctctgattgatatcacgtcagggtagacgtcacgagctgccgagctaagcgcttcgactttaagaaacacagtttctggggaacgatcggtatatattttgaaccgtgaagtcatgatcatacaaagatatcataaaggtctgacgatatcgggacagcgttgcttaattgcacgattcctgccgccggagttgactttagattttgtgatctatgctgcccttgtgcgtccgacacaaggttttttcttcactcaactacaacgtgggggctttacttcggaccgttctggagaaggtgacgctttgttgtactatctcttcagcactacagagcagggcaaactgaatgggaaaggttgccgtgctgcaattaacatgaattttgtaagttgcggtaaccagctttctgttcggacttacagacacgtcgcgatcgcattcatggagaagaacattacatcaacaagatcgaatcaggacatgtttgattttcaagccgctcatgcaccggcaacggtttcgacgttgtatagccgttctaccacggatccgtattttatgtcgcgcgatgatatggccgaatttgtttctagttcccaccagtggcataaacttctcggacctagtaactcgaccagtaccaattgttacgccccaagtgaccaatccgagataataccaaggcggaaaagttcgccgacgtctcccgtgcagcaaatttcaagattcaatcaacctgctccgcacggacgcccaatcacagttgtcgtaccaactttcagctatttttactattggcgaagctattaccagcttacttccggaacactttgggtcagctcggattttgctccgatcatttcttcgtgaccagactgcttcgtttcggtcaagagagcagtgtgttgcaacgacactgattttgcagagcgtctctaatttactcgttgtactccctacaaatggtgggaagtccttgctgtttcatttggccgcattttcggattctacgcgtgttgtcattgttgtggtgcctttggtagcacttttattggactcgcttcggaagacagaacaattgggaatcaagtgctctgagtatcaacacgatacaagtcctttcacagcgctaccatctattttgttcgtccgagtaacatacttggagcatcaaaatttccggacgttcctactgtcgctacaggagcaggacaaactaagcagaatattttttgacgaggttcacttggctatgacctcgcaagattaccgcaggtgcatgacattcgtctatgtgttatcgtccatttcggtccagaagacactactgacggcaactctccccccacttgggaaaatgacctcatgacaatttttggcttccctttcgtcactgtgagaacgccgacagtccgagcgtcaatacgttacgaagtggtggaattgttatcgaatacagatatgatgaaggcatgtctatcattcataaaacttccaatggcacatcctgacaaaggcattgtctttgcgttgacaaagccgaaggtcgaagatattgcaaactatttagagcgccatacgtccaaagtggtcgcccggtatcatcgtggaatgactttcgatgagcgcaagaataatttgtcattgtggaagtcccctacctgctcgtatattgttgcgacgtgtgtattgggtcagggtgtggattacccgaacgttcgaaccgtactacattttggactagcccacagtttgaccgattacgcacatgagacaggtcggtcggggcgtgatggtaagccagcaaaatgtgtcaccatatacagtgaaacatacttccagcgcttttcgaagcatttgacagtggggtcatcgaacaataagggcgaatatcaagcccttagtacgctacgggcattccttttagttaaaacccgctgcaggaggcaacgactacaagacgcaatggacggtgcgggttttccgtgcacggttgacgatgtcaacgagttgtgcgatgtctgctctagagctatgggagatgatcaaaataaggccccaatcgcaccagcgtcacgaagtattcggttacagtgtgcagaagctaacaccagagtcctcaacgacgaaagagtctacatgctgatgcaggaactgattttcaacgatggatcgacacattgcgtggtatgttggatttctaacccagcgaaattcatttatcactcccagaggcatgcccacatcaagcagcctactgtttgaagtgccttggtgcccatcctgtacacgagtgtgagaatcatttaatttttgggtctcgctatccgtcgtgccttttctgtggcgttccaatacacgacgcgcattggaaaaacgatcttcattttggcagtaagccgggatcttccttcaactctcgactgcgcgggaggatgatcccaggtgcatggagattttacgacgtttgtcgaactcgcgcatcatcccgtggaggaattcaaggtgaaattgccctcttgacaagacaggaatttgtacagtggcttgtgaaagtacccaccggtagctcgtttaccaacttgtgcattttgtgggcatacattcgagctctcttctccagttaatgagctgcaactactcgtcccagaactgtggcttagccacgagaagaccgtgccattgatttacctcatacccggtttttagataacgagagcatacatttgctaaacatttatgctttctagtccatattttcattcgacagatccaagtggggtcactaactgcattcagcgatgccatctgttccgccagcacggcgggtgccgttggctctagcctgaacagtgtcaatgctatattagaaaaaggagcgtgatcgatttagattgtgctgcaagctgctcgtccgtgtgagcgcaacgttatcaaagcaaacggctccaaagcatctacgataagcataccaagggtggtcgtagcaaattattcgacatcgccggtagcaccaccatgacgtttcgagccgcacacgcgacccgcggtggtgtgtaggcactgcatacgtaagtagaacggcagacaccgactagaacgacggctatagaaagcctggtgctgccagtatcggcggtctagtctaaatctagaaaatgtgccaagatgtgtttttgcggccgccgccagcgccggagccacgctttgaggcgccaactgacacgatgcgcaggcgaaggttggtaggagaaagagcttagtgggcagaaagacgacgctaggaacaccgtgtttcccactgaacaactttgggattgatgagggaaaacctcgaaggtgccaacccccctctgtgttagctgcaaactactatacgccaacgggctcaaggagtcgcgtcccgtatactcacaaccaaaggcaaccttgggtgtcccaggtgtatactgtatagtcaggcacgctggggcggagccagagtcactaccttttgcatgtgtgaaggacgaacttcacgcttacatgaatacccctgggcattgtagatgccatgtggtcataccggccggttgaacatggatgcgcttaacaccatttcctgcagaatgcatacgtgtattgtgtaagtatgaaggaagtgttgttacactgatctttgcatctcacggcgagtttgctagggtggccagctcttcacggcccggcaacagcaataccagtagagtcagcgtactccttcgccagctcctgcgctttcagctgcttgatgactctgttctcaaactctacccttcagtggtatacaccagcccaattactcaggagcgcaccttacctttgtagttttcgtaggacaccacaccgtcgacagtttccttgaactccacgctgcactgccagttcagaaccatcgcggggcgcttcggcagctctcgctgaagacgcactgccgaaaaatacgcctcaccatccttctgtagggcgcgtggacttttgtgtggtctgccgggtggtcgtcgagctggcaggctcttaagcatgcggcctaagtcgaaattttccagaatcgctaatgcgcccagcacatggctacagatccaaccagacgagtagtgtgctttgcaatcgcatcggtatctgttacgaactgcacggatctatacacaatataagagatatgtcgatagtacatatcgatagtatgagccaaaacatgtatatactgcgtacctcttccatggaccagtttggtgactcccagttgtgttgatacggcgtagtttccaggacggcaaccttgtggagcgacaaatagtcgatcgaaatggtgctcacttgggcaattggcttgagcactccccccagcgactttaaaaacgtctgcactcgcttttgagtgagagcgacgccgttgagattcgtgtttcctacgacgtacgcctttgcgttgaacacaaccgcttccttctctctgcgctgcgtccgaggcttgaacacgacgcggtgattttctctttggctcagcagttgtgccgccgccaccatttcgggtgggatgggcccagtgcagaaagtggtgattggaagaccgacgatgctgttggctgatgcgcttgacaggattctgggtaaagattggttgatgacataggcggtagaggctcgtagagataggacattcgcggttttgatcgtcttgtggtacgccttgataggattctggttcggtacaatgcccgggcacccactgcacgtcacaaaccaagcgcgccatcgttctgcaagatattcctcggacagccacgcctcgtatggcgcctcgttgtcgacacggatttgccgctgaccaccgcggctaaagcaatgaactgtttggtcgttcgagccttatggagccagttcagtgaaggtagaacgacgttttcccagacagcctcgtggttcagcatactgcgccctttctcattggccttgcggacgaagtgaggccagcagttcaatagcaaaatcagcggccattctgcagtaaacgcgctggcgattgcgtctgagtggtccagtgatctaaaggcaatctacaaatcgatgttgaagaaaggttgcactgctgaccggatagttgcatacagagcctggtatgtctccgtagtctcagatcggacaaacatgtacgcccaggggatgaatttgtgctgaaacgccccgcgtgcatggtgcacagcatacgtgcccaagtccacgagtgtccagccacctctgtgtatctgtgtagtttgtacgtgccaccagctgctacgacgacgccgtgatcgctttgtccgttgacagccccgacgacgttccgtagcagagtacgtgtagtcacgacaacacccattgcctcgtcattgtcaccgtacgtgaaacacttcagaacgatcagctcgtagcgaaaatcggccggccttgccttgaactcggctagatcgtgtgctgcgtcgtacacctcactatggccgaagaattggtcgcgcgtagtgcattcgcgagcccccgcccacatggcaagctcggcgtagttggagatagcatccgctgttacattaggcaaaatgacgttaataacacgtgttaaacaagcaaataaaaaaaattacctcgatcttcgcggctgatgtactgttttctagacttcaacatcgatcgcgaggggagtatccaacatctcggggcggtcagcgtatcgattacgcaggatagtcaggcatccctctggtccagcaccgccttctagaatattgtcgacctcaggctgaaaaatgccgtcgatgcccgttagggtttcttcggagtcttccgtcgtgtgcgtaccggccatggacaatttgtaggcaccgttctcgtgggtgatccgagccatacacggacaggcaacatgagaaccgcagtaagacacagttacacccccggtagctgtggtgtagttgtactggtaccgaaatcttccgccgcagagtacagccatctgcgacttggcttgtcggcgagttgtgtacgtctcgagttgcaaaaagtcatgcggtggtgtacttgtgtcggccgactcgctctctgaactggaagaacgtaggctgctgatctctaagctgttgtcgtcgctgttgacatcatcggcactgtccgccatggttagaaaaaccagcgcagaagcgaagaactgagggggggcgacttagagactgcgagttgaataacgaggaatgcgaggcctcgggcacaccgcactacctggaggggtttcgtagaaatctagttgatagcgaagggtcgggtgtttcgtttgggaagatctatagaaaaatgtagtggtttcgcacatctcgttcgttacttattttgagcaaaaagccctggtgttttgtaagataaattaagaatagacagagagctggtggattgggtgtttcattagataaattcgggattagttgagagtagctttgtcatactaccccaataaaaaaattaaacacccttcaaattcgaagaaaaaatgagaatttgaaatattttaactcgctttcattattcgactaccagagtatattaaacccagatcaatcaaattgaggagaacttatcatggaaatatgaaataaaaacacgttgagcttcacttgttgatgagacctgtggagggtgtgtcttgcaatatcaaacgaatacgaccacttctgacgaacggcccgacttcatcacggtcaccaagcaccaactcgcccaaggatcggccgtcgccacgcccactgatagccaaccagtcacctcacctcttgttgcgcccaacgagcagaagccaacttcaccagacgcccagcatcgacttccaacgcttgataagcaactaccaaccacgacacccgccgagacacctaataaaggccggaagaagaatccccatgaccaagcgcgccgcgatgaccgtctagttgttcgagacgagaaacgatcgtcggccaagcagtatccggtcaattgtgggcttgcacacaagaaatagatgacgagggtaggtcaagcagaccaatatatttatccagtctaattggaccgccagccctctactcaacgtgattcataatagcaggtgttccagcgggtgaacggcatcctgctgagcaacttctccaagaagaacaatgaggtgggaacgcagatcaccgtgcagcagtacacggacggtgtaagagcaactgcacactcgacgaacaggtcgcgagcacgaggttctagatgagcgtgacgacgaagatctccacgagcaccaacatgacattcagtacgccacagccacgcggtcacgcccgtgtactccaggacatcggcctgcggcaccagcgcgacggaaaatagcaacatgatggacgcgatagctaccatgagagtcatcagcagtaagcacagcatcttggaccacagtcgcggatacatgcacggcatcgtgagccacagtggcggatgcatggcgaagtaggttaggccctgtacgacgtagatggacagcgcctctgaggaaaaaagagggcgtagtagatgcatgcagagctagtcttcctagctgtctttgtcggtgtggttgtaagttgggcaggttcgaactgcaatgcaatgtgtcgattgaatcgcaaaacgtttgaaaatgcatcgaaatgtgtcaatcgaagcgcaaaaagtttgaagacgttggtgggcctgcatagtcgtatgaaagagctgaacgctcgggcgatggagccctgtgtagatgttaaccttcaacggagacagctgtcgtaaaaagagtgctttgacgcgccatccagaagcaacagctagaggtgaccaagtgtattcatacacactgtagagtacactcagcccacgaaaaaaacctttaggtaccaaaagaagatattttgattaggtccaaggttagtgctgtctcgggtcaggatccacactataggaatcgtgatactttactttttttgcaatggacatttcctaaacacgtaatttgatcaaaaacacgtttttttcgcacacgcgtttctgtaataatcctgaacccccttcggaaacttggaaaacatatgcgttagtagcgcgtgaaattattcttcgcacatggcattctaccttttagtgcttgggtgtggaattcgtccggatgacacgtgaaattaatccgcacccgtaaagtagaacggcagacatcgcctagaaccgcggctatagaaagcctggtgctgccagtatcggcggcctagtctaaatctagaaaatgtgccaaaatgtgtttttgcggccgccgccagctccagcgccaacgcgacccgcggtagtttgtcggtactgcatacggaaagtagaacggctaacacgaccgagaacggcggctataaaaagcctggtggtgccagtggtctaaatctaaaaaatgtgccaagatgtgtttttgcggccgccgccagcaccagcgccacgcgttcagccgcatacgcgacccgcggtagtttgtcggcactgcataaggaaagtagaacggccaacacggccgagaacgacggctatagaaagcctggtgctgccagtatcggcggtctagtctgaatctagaaaatgtgccaaaatgtgtttttgcggccgccgccagcgccggagccacgctttgaggcgccaactgacacgatgcgcaggcgaaggttggtaggagaaagagcttagtgggcagaaagacgacgctaggaacaccgtgtttcccactgaacaactttgggattgatgagggaaaacctcgaaggtgccaacccccctctgtgttagctgcaaactactatacgccaacgggctcaaggagtcgcgtcccgtatactcacaaccaaaggcaaccttgggtgtcccaggtgtatactgtatagtcaggcacgctggggcggagccagagtcactacctttttcacactcccacttcgtggcagtggcgacggccatggctgcttgttgctcatgcctgattgcctcatcagaacgagctcgcttgatttgggcttctcccgctggtggcactggcatcacattcaggagcggtcgcagcttcttgaattgcgtgggcccaagaggcttcgtcaatatgtctgcaatcatctcctcagacggccaatactcgatagtaaactcatctctatccacgtagtcatggatcctgtggtacttcagatcaattcctttgaccttgtagtccccagtgtttgccgtaattacagcgatagcagcttgattgtcatcgtagagaatcgtcttcttgcagtgcaatccaagctccttacagagattgtgagtccacagtatcatagttgcatcctgtgctgtagcaacaaattccgagctgcatgtatcatctgtaatgagtcgctgtttgtggctcgagtatgcgtaggtgcatccccccccctctgtagcacgaaaccagagaccgatcgccgatcatccttctcattgcccaaatctgcgtctgcatacgctacaactttcagatcttttactgagggtcgtcatgcgtccacgtaggctgcaaattgcaagtcgggcttctcagatagtgtccacactagaccgtaatccgtagtccctctcaggtaccgaagcactctctttgcaagcacgtggtgctcgtgcgtgaagcagttcaggaatttccccagcgtccggacggcgtttgtaatatctggccgcgtgcactgtgccaaatactgcagtgatcccacaatctgccgatagtcaatgtccgggtcatcattaacacacactggttccacatctggattgccaggcatcgggaagttccctttcacctaccggcttacttttctgcatcttgaatctcgacaagatcttctcacagtaccccttctgcgagatcgtcaacatgcgccccggcacgtacgttatctccatccccagcaagtgcttcacgttacccaagtccttaatcttaaacttgcttcgcagctcagctaacaccatctcaatgtcaggctctttcccagcaataagcaggtcatcgacatacacagccacatagaccttgttcgctgccacggtcctcatatacacgccagcgtccatcttggtacgcttgaagccgcacttgcgcagatacttgtctagcatccggtaccatatgcgcggtgcttgtcgtagaccgtagagactttgctgcaacttgcagacacggcccgaaccatcgttgacatagtcgggctgctccatgtatatgtctgcttctcctatggtccattcaggaatgcagtgacaaagtcaacttgtatcgacagcagtccgagttccagagccagcagaagcaagaaccgcactgattcaatcttagcgacaggagcgtacgtttcccaaaagttaatcccaaactcttgttggcaacctttcactgtaagtcgcgctcggtagcgcactacctctccttgtgcgttcctcttctttaccaagacccacttgttcttcaagacgtttactccttcaggtcgatccacaagtccccacacatcgttgcgcagcatctcttgatgttccgtgttcagagctttaatccattccttagcatcaggagcagacaaagcctcttcaactgaagtcggctatagcaattcattcactgcctaaatcactaagcacaccggaatatctacatcatagtcgctcagccggacattcggtcgtcggatgcacgtcgaccgtcggaacgaagcaccaactccttcatttgcctcgtcatcagtctctcttcctgcttccactgagcaaggaatttcttctaccggatcagcgttcgcaattacagcatcaacaggatcatcatccgagtcactccagtctgggtcattatccgcaacatctgagtcactgagagctagcgagtctcttgaagacgcagagccactgcggttagacagccctccaccgtgctcaaaaggtgcagaacaactgcgatgaggcaggttctctccaccttctgcaccgccgtctccatcagtgtcctcatgctgtggcacatgattcacttctcatagtccacgcgcacgtgacgaccgagctacagtttcacctgcacccgtcggattcgcgctcgacgtgcctgcaggagagctagccaacgccggcccacccacagcaaacggagcttcaactacagtactggcttgccctcgtaagtcctcactgcaacgccgtttatcgcgatgttcatcactgtgatctctttcaggctctccgagaggtcttcgagctggactgggggacgtcaagtcatctagccgaacaataggaattcgggacggaagctgatacttgtcgcgcttgtatcgattgagcaggagtttttcaacataactgtactccacagtccagttctaagcaaagtcaactgtcctaagttccttcaccttccagtcttcaaatctagaacgcggtagctcatcaactccttgccgtacccgaggaagagtctaggctgtccaggattctctaatttgttcttccttaggacttttgcagtgaaggtgtagaccaatcaaccccacgttctcaggttggataggtccggccgctctccgaagcgccgagtgtacggtgtttctccgtcaagtgcagcgcttggactaatattgagcacctccaccgcaaaatcaagcgcttctccccagagcaggttaggtagattcatcgttgtgaacaagctccacacacgggacagcaccaccccatgcatgcgctcaacgagtccattttcctccggactgtatgagttggtctttgccagcgcaattccattcgttctcaagaaggccttaaaccggttactgatcagttcacctcctccgtccgagccaaaagcttctactcgatgacctcgtgcgagtatccaagccacatgtctcatcactacatcggcagtttcctcctttcgcttcagaagaaagccccacacgtaacgagtcgcttcatccagcacaagctggaaatgtaaataaccattgtaggtaggctcgttaaggaagcatccatcagacattgcttctgatgcggctcccgcactctatcagtggtcacctgcttgtacgacatccgtcgcatcttggcttgcacacacgtccaacactgctcttcgggcgcgcgcatactcccactcaactccaagccatccacagtgccttctcggaccattcgctgtaaagcagcaaagttgagatggccgagacgggcgtgccaccgtaccaaagctcgctccttgtccggccggtttgctttgctcgactgcctctacttgctttgtaggacacaccgtcgactgcaagtgatatcgtccgcgagtcttcatcagtctcagcagcactctacccttacgaagccacgcacacttctgtttcttcagcttgacgaagtctcatctgtccttctcaagcttatccagactcagtaaattgtttgtgccgctacagtacctacggtaattagtctgactgggcttatttacattaaatagtctgactgagactatttattgactaagactatttatgtagcacgaaaatagtctcacctctcattcacctggagctgtaccgctcttttgtttatctggagttgaagtcacaggctcgccttcaaagtgggcacgatgcttcgccattatctcttggagatgaggatagagttgggctacagaccaggttccgtcgattccaagcgacaatccgcagcggatcatcgcttttcgagcgtaggacatgccgttcttgtctttctggtgattgacatctctgactgcgtcggctgcaagctgaaggaaaaaactttttgccagggttttgaagcttgcccgaccacgacccgtccttgcgaaccttattttgccaacagttctccttgataagactcagctttttcgcgttccaccttgcttttcatgcgtcttttatcttcgcaatgatgaaggaatctgctggctggcacaagtcggtggcatttggagggaagaactggagatctgcattgattgagttgagttcatcttgacattggtcggcttagagcagttgtcgaggtagatggtcttgttgcggtcatgtggatctgctcgcattgctttcctttcactcagataatttcgaaaaagtctttgtgtcatccatcctttcttactggatcgataacacacgcccggagtgtaatcgggtacgcctcggataggatgtttcccctcagcattcataaagatcatcattggggagggggggggccttgcgcttgcacctcccaagagccgcaccaccatggtcattccttcgccacccgacacaacgtctgcatacttagtctgttgttcgcctgagaagcccaaagtttttccagtgtcgaaatcaatgacaaaatgcgtctcatcaatattttcgattgcattttcgtccagtgacccgtcggcaaacccacgctgcaactccccgaggtgaaatgcaacctctttctcgatatgtaggatcttgggctggctgagctgtcgtttgccggtctgcgtcctcagaacaatctgatgggcctccatgaagcactggatccaacgcgaattgattttctcgatgatcagagtctgtttggcatcgacgctcatatgagtatactcgccctccccgtctcgcaaaatctgtttcgcgagctgcagcagtagtggcggctcaaacttaacgccaagtttgtgtaaacgatcgaattcgtcaagaagtttcgagtacagccacgtaacccatgcgctgcgagggcggcctcgtccactgatcaccttggtgctgacacgccgcctcccaccacgtcgtcgcgccgagacggcaactacgcctcgttcggcccccaaaatcaggtcctttttcgcccaccagtctatcgccttggctaggttggccgacgctgtcgctgagttgaaaatcgtaggaaatccagcgacagctttcgcaaacatgtctttaacgccttgcgtctcctcgtgcttttccatccaccgaacgaccttccgacggtttgcgatactgctcgctgcttgcgtgtgacgtccaactgcgtgtgaagaagcaggtggaggaggctgccatacgtcgagctcaatgtccggctcgctgtccaaaagctccacagctagatcagtggccgaaccgggggtgttcatagcagcggagttgtcagcggcgccacgctttgagccgccaacgcgacccgcggtagtttgtaggcactgtatacatgaagtagaatggccaacaccgccgagaacggcggctatagaaagcctgccgctgtcagcatcggccctcaggtttaccagttcacagccgtcacctccgttcactgcgtcgctaatgagttacttgtacttcgtagggcacacaggaacagcaagaactagtctacacgggcaaaggctgacattattagcggtagttagctttgttctctgctcggcaaaaggcggaatgatcttgttttgggtgcggggactcgagccgttagagctcacacttcacctgtctctctaataggcaaacccctagcggctagtgcccagcagagaagtcgtcgtttctcatactctcttctcgacttcggcaccgccacttcatgatccacattagcaccaaacaagccactcaaaacaatcagcacagattcctgtctgtcacaagaattcttgccgcttgaacaacatgcacttccatatgcacgtcacacactgcgagcagcagcgtgtgtggatctggccttacacctagttgcagagctctgcatcttgccaaacccttacttcgaaaactcatcagcaatgcaggctctcttatgtttgcaacaggtcttcaaagctggtcatcaacatcaatgagactcagcgtgactcagctggtcgtcagcctcaatgagactcagctagtcagcctcttcttcccactcatcagatttgcccagggctgccaacccgacggcacgcaccccaaatcgttctcggtggcgccgaaacggttccataggcagtggcttcgtcagcaggtcggcgacattgtccttcgacgtcaccgacctcacgtccatgccatgttcgtccacgtactcacgtatcttaaggtccttgattctgagctgtttggtgcgatggtgcttgcccgcgtgttgcatcaattcgcgcgcactagtcgagtcacactacagcgcagtcaccaccctcggcaacttcaactcgtccaccagctgctccagccacacagcatcatgcacccctgcattcgctgcgatcaactctgcttcacacgtgctctctgcaataatttcctgcttccaggtcttagccgaaatcaattgcccattgcagaaaaccgtaaagccagtaacagacttcatatcgcccccttctgaggcgaagtttgaatctgtatagacctcgatgtggagcttgccatatttcctagcttccaccaaatcgtacgcgagacccatgtcctggctgccgaccaaatatcgcagcactcttttagctgctctccagtgtacagcactgtacttttccaagaacttgctcagccttcgaattgctgtagctaagtccggacgagagccgctcactaagtactgcaagcatccgaccaagctacgatacggcaagcactcatcacgattgtgctcgtcatcactagctggtttcaacttcgctacatcagtcgtcataggagtgctaacaggataagcagcatccatacgaaacttctgcatgatgtcttgcacatacttcgtctgctgaaacatcacccgagtttccgactcataagtgatctgcaggcccagcaaatagttcacggttccaagatccttcatgttaaagcgaaccatcaacttatcagcaataaaattcacatcttgttcacaaccaataagcaaaatgccggctaggtagatcggtaggagcaccagacgtgtctccacgcggatccagtagagagcttcgtccttgaaacaccggcgaaatccaaactccaccagcgccaagtgcaacgtgctgttccagttcctcggtgagtgccgcagaccgtagatgctgcgcttcaacaggcatacccagtcctcttagccgcgctttacatgaccttgaggttgctccatataaatcacacgatcaatgggcgcgttgaggaacgctgtgacgaagtcgaactgctttacaacggctttcgtcaggcaagcgtacaacagcacaaatctgagcgtctcaaaacgcacaacaggagcgaacgtgtcgtcaaactccagcccccaaatctgaaggcatcccagaactaccaatcttgctttgaatctcagcagtcggtgttcattctccttaagtacccacacccacttattcttcagcacatgagcgtgcttcagccttggcaccaaagtccacgttccgttcttcagttgtgctaagaactcctccttcgtggcatccagccaacgagaacactgcggtgaaactatcatctccgcccacgtcgctggaacttgcagtcgaatcatggctgtcgacgacgcagacgagctgaacacactcgcgataaagtccttcaagcgcgcaggcttcttcctttcgcgctgagaccgacgcggctcgctcacttccaccggcaggtgtctctttcgtttgcgtacaggctgcttttcttgagactctcttccttttcctcagtatcttgtgtcgcgctatcactttggttcacattccccctttgcgtcggcacattatgaaagtcatcgatctgaacagcaggagcagcgctagccgaacgctcagctgcagcttccccactctcattagagtcagccagctctgcactctcactaggttcaggtacttctgcaacaggcaaatggacaaacggcagtttcgtgctgtcaaaatcgggtctgtgtctttggcgatagaccacgttcaacagcttctccacatattcattcgatacagtcgtttcctcaaagaacttcacgttctccttccgatgctctgttatcaacccattggtcaagtcaagtagacgataccccttggtcttacttgcgtagcccaccatcaaagcaggagcacctctcaccgatagtttggtctgtcggtacacgttgtctacgaacttcaacgtcagacaaccaaaaggacgcaagtgcctcgcgctcggcttcacgccgaacatcttctcatgcggcgtcaagttgcccttgttgcctttcgtgcttgtgcggttgattgtctcaaccacgtacgcggcggccacaccccacaacatgccgagctgtacaacacagctctgaccttgttgaacaatgtactgcgggccttatcaatcaaacaggcctcttcaggtgtgtgcggatgcgagaatatctgcagcgattcacccctcaactgctccgccactttcgtgttcacgaactccgggccttgatccgagtgaaaaatcctcacatctttatgatgcttcgccttcacgtggtcgcggaaatcacgtagtcgatccacagtttcctccttattctgctgcaggtatagccactggtaccgtgagccttcatctatcaggtgcaaatacaccgagtgcttctctagcgtaggcacgtcgatgaaatccaggtccatgaacactttgtgaaacggtactgtagttcgctctggagcagttttccgatgcgacacccgcttcatcttggccatatcacagttgtagcagcctcctttgagtttcctatcatgctgcttcaaacgcatgcccgtcaggagtttctttgcctccatatctttgactgtctgcgtgccaaggcttcaaagaagacgagggtggtggctgggcagcaacctgcaacactgggtacgattcacagggacgagatatttctaccttcgactgatacaagccgtcaaccatgtcgtacttctagttgtaactcatcacttggttagtcaacaggttcgtctcctgatcgtcactagtctgcgatttgaatccgtgctgtagatacatcaaccgctgcgaaaggatgttggtagctccatccacaaacaaagcctcaacggtgatcggcactttcatctttgtgaccgcatctaccatcaccagcttaatcagcccctaatacatgggcttcagcgtcgttgatttctccacccacttcatcacagtgtcgttgtcctcagtcattgagaaaaacgcatcgcgacatccacaaatgttcactccagatgcattgtccaagacgaacgacaagcaaaagccagcagcagactcagtcctggatgatagacaaggcgcatcatcaccatgaacaacttcaatcatgtgaacaggcttgcccttgggcttttcctcacacgggttgtgataccctggcagatcgccatgggtgtctttatttttgcccttagcagctttcttgcccttaccctgctttcctttagctggctggtccttcttcgaagccgtacactcacgttcgtagtggccccacttgttgcagttccagcacttgatattggaacgacgccgcttttgctgtccaccttgagcagctccaccaccgccggaatggcgcttcttgttcccgtgggtgtagaaggcactctccccgtgcggatgctgctggtggtgcgctccacctgaatgctcactgctcttccgagcacgcgcctctgatactgccttcgcttgcagtagacggtcttctctgctggtcaacttgacattaacttggttcagggtgtagtcgtcaaggttgtcaaaagtttccaccagattctcgcccagcccagtcaataaggctgtgatcacctcacggtcagaaacttcccccccatgagagttaattcctgacgaatggcctcaacacggtggatgtaatcacgtatcgactcgtgttcaccatcgaactccacattgagcaactcacgctgcttaaaaagggctacagcaaacgacttcttctcgaagtcctccaccagagcaccccacttggcctgcggggtgccagacgcacgcgcgttccgtcgtccagcgtgttcgtgagattgtcgttgatcatgagcaccctttgcttccacttcttgcgacgcgctgccgcctcaggagttccatcacgctcgggcttggttcgtttcccgatgagaatctcccagcatttccgagccatcaaagccgccttcaatccttccttgtaggcgataacgttcttgccgtcgaatcgaagagagcgaacggtgtcaactcggccgccgtccaggcccctctggtttgggctcataaccatgagttacttgtacttcgcagggcacacaggaacagcaagaacttgtctgcacgggcaaaggctgactttattagcggtcgttagctttgttctctgctcggcaaaaggcggaatgatcttgttttgggtgcggggactcgagccgttagagctcacacttcacctgtctctgtaataggcaaacccctagcggctagtgcccagcagagaagtcgtcgtttctcatatcgcctgctccggtggagaatgcatcgatctatgttgctgctggaccccaccaggtcgctgctggcgcccaccatgttgccactgcaaagcgttatgcagacattctgtagcatagacctccaacattgcttagagagggagggggattaagtttgccgacgcggcgcttgacatgcggcgcgcctccaaggacgcgcgcctttgtacggtcgagctgtggttacgcggcgtgatgatcggtacgtacgtgcgctcgctccgccgacgaagatgcgcctggtggtgtcgaaactcgcttctcggggcagccgcgttacatgtaatacagcgtcttacacgccattatatattgtagaggaccaataataattgcttgatatcaacatattttatataatttgtacggtactacaaaaaaatatcagctttagggtttagtcgctatcagttattagacaacctcagaccgcgagcccagattaaaaaatcaaccaaaatgagctaatttgggcacgatggaccctggatgagggtcgtgaacgcctaaaatatgccggcccaaggaccctaaaggaccctgggatgaacgttcatccgggtcgtaatatgtatagggcgtaacaagagcagcgcgactgtgagtcggcgcctcgaggccgatcttgctatcgccagcggccggaatgcgctccacgggcgctacagtcgccaaccgacaggagggagacatggagggtttccgaccatatgtctttgtggtatagcgagttctgagtccgcaggtcggtagttgcagtcagtccggaccgagtgtgtacaccagacaccgactggaggagtttcgccgacgctggatcccaaaagaactcaagggtcgttgagcgaagagtcggcgagcgagcagacttggttttagtattggagaggccgtaacagcccattttcattaggtatttgtatagaaaccccagggaagggcctttgagcccaacaaagcaaagataaatacagaatggaatttccgaggtcctaaacaagcggcacgcggcgtctcttcaaggtacgaccaccccccgtggggctagatcatgaccaccgctgagataggctatccgaagtgacggaagtgttctcggccgcccggcgagtccaagagcgagtgcatgtagtggttatctggattccgcccctggcggagagctcgtcgagcgtacgagcgcgggttttcggcccgcccccgactcagccgatgcggttttgcatcggcgccccgtaaaaggcgagagccgccgtccatcctttggtggagggcacgggtcaaggagagaaggagaaggagaaggagaaggagaagaggcgacaaggagaggtcggcgaaagaaggggagcgtgctctgtgcacgtggcacggctcctgggacgacttggcaggtgcctgggtaaccactgcagcgctgtaaacggactgggcgatcttcggatcacccgacaagcctgcgctcccgttagtgtaggtgttgttggtgtgggagtgggaagctaacgagttttggcacgtctgctacaccacaactggtgccgcgacccgggaacagggggtttgtggcacttaggtactcttcaagtcaacgagcaagcaagtgaagatggtcaagacaccgacaagtgcgcgaagcggaagtccggcggcggccggagggaggtcaagtgcgcggccgagaggcgcggacgcggcgacgaaggcgacggccagcacgccgcgctcagtgaagttcgaccgagtcggcgatcgtgatcatggaagtggggctgacgaagatggaagtgaagatgacgtggagatgaagggcccggcgccgatgctggaggatgaggacgtcgacgagctaacggttgtcgtcgggaagtcgggtgcaccgcgcccgatcactcgccgacttgatgcggagctcggcgaagttactccggccaaggttctggcacccgacgagcgaccgaccacgggaagtcggccgccggtgaacggaaatactccgaatgcgtacaagatactggggcaagtcggccgatcgatggttgctgcaagcgcgtgggtgatgatgttcgcgctgagagaagtcggcggtgccaagtgggtaacgctcgagagggagctggcgtccccgatcgacagctcctgcctgttccaactcagcgagcagaccaactcagcgagcagaccaagcgtctgctggtggcaatggccttcgagtgcaccagcgtcccgtcgaaggtggctttggaagtctgggagctcgccgaagtaagcgccgacctcaccaagtggaagcgcaagctgaaggactcgtttggagtgcgtgggacgacgacggtgcggaagctggacgacgtcgacccgagtctggttccgctgccgacgacaccgtggaaagcctccacaggctaccagatgcagacgccggacaccaagcaggtcttcggcaagacgcccgactcgccgtacttcgcagactcgcacatggtgacgccgaagaagaatagtgacggtcggcgatttaaccttcccgcgctcggcgatgatgatgacgacgacgatgacacgggctacgacttcgctgacccgtgtgaagacctgacggcgcagattcggcgatcataccagcgtgaagacgaagacgggacggggctcagcgagttaagctgacgcaccacacctcgctgaacaagttgacaaagttatccgggactcgaaaccgcagtgagcgatcgctgcgctggctcaagaagttcatctacgagatggagggaaccaacacccagcaggaccgctggtgtgagccgtttcagctcctcatggagagtggagctagcaactgggctcgccagctcccgaagaagacgcgcaacaagtggtcgctgctgtgcgaggcgttcatggcgtactactgctcgcagcacgaccaatccgccgaagaccgatattacaccgccacgcgggacgaggggggggggcacatctgcgcctacctgctgcgcctgaatgtgtacgctcgctcgccgaaaatcgcgtatgaagcgggcggtaccatcggcgcgagtcacgtcaagcgcttcctcgacacttgcgaagatgatgcgctggtccgacagttgatccctcaacgattcgacaatattgtcaaggtggaagctgtgatcaacgacacgatggccgctaaccgacgccgcaaagacaagggcagcacgcgtaaatcatcacgcgatggatgccgacggaccgacagcgctagacgtgacgcccgtaggaatgaccgggatgatcgccgaggtgacagccgcaaccgtgaagatcgctacgatcgtcgagtcaccgtcgcaagtgcgtcggtcgacgaggtctatgacgcctggcaagaccgcgtgtctctcacgcctcgtcgccgagtcgactcagatgattactcggagagcagcaatcattccgaccgctcatacaattccgagtatgaatcggatcgcgatcacatgaacgtggctgagacgagccggagtgtcgcaactcagcgatcagacggtcaaagtcgcgcgaatgtatcgggcgacgggcgtagagacgaaggccgccgaagccggtggaacgaccaagaacgccgaggtcgtccggagtatgggccgtgcgctgcctgtggcgacccgcgtcactcggtgcacaagtgcttccggcggtgcaagttttgcacgcaggtgcatggtgccggccagtgcgagcaccacaagctctacgaggaggctgtgaagttcctgaagtcgaaacacgacaaggactcccttccgtccgagctccaaggcatattttccagcaatttaaacgagcgcgcccgccaactataactgggttgggcactgacgggcgctcacagttgtctgagccggcgatcgaggcaaacttcgtgtttgcctgagcaaatggctgggaaaggacaatgcgacggacatggagttgaaaaacgacggaaaattgaacacggtcgacgagccaaccatactgaattcaagtcaggatgtcagcgaatctaccgggatgatcacaagtgcgacgctgcgtgagacgaggccaaccccgcgagtcaaggtgatgaagctgctcgcgggcgagcgccaaggatggtggtcgcagaaacagttcgatcggcgaaagcgggtgcgagcacttgtgatgggagcagtgaacgacagaaaaacggagattttgctgggcacgggcacgaacgtgagtgcggtcagcgaatctttcgctaagaaaatacggctgagacgcagggtgaacatggacatgcagctggacatacaaggaattgccaaggacgaggtctacacgaacgaacgtgcgaaggtcaagctgacactgggttgggagttggtttacgattttgaagtctagatcatgcctcactacgcgggggtggacgttattcttgggactgacttcatgattccagccggtgtcaggctggacctcttccggtcgacgatgaagaacccggaggaggtggtggtgccgctagtcaagtcgcagaaggaagtcgacgagcgtagcgctgcggaacatgtagctgggagcccgccggagacgatggaagtactggcgggcgagacagttgagttcaagttgtccaagaactgaccaagctgggcgacccacgatctatgggctcggcgaactagagatctgttgccgacagtggtcttcagcaggtcgggaaaaccgacgagggtcagattgacaaactgcacggacaaaccagtgtcctgtccggcacacttcccgttcgtgtattggatcccgcacgaggacctgccgctcagcgatggatacgtgcaattgcataccaggaagtatcgtgagtggcaaatactggtttatggatcatcgaaggcgaagcatctactggaacacgaacgtcgcctctatgaagaatggtcggcgaagcaacctccagcagtcgagcagcgggaatacgcaacccctgctggagttcatgccgaccagccgatgcaccaagaggtcctacctgcgaagaacaatggaatcgactcggcgagctatccgacaccggagccgacgagacaggggtgactgatgaaatctcgtcgaattgcggcgagagcgacaagtctgaggaagcgacagtggtaagctgtcctatagacgccggggaacaagactatgcgacccgcgtcactcctcaagaaggtgaatttggtgaagttcggtcggcgaacgaagtccaagttgcctacgaacacccaaggttctcgcctgacgatgataacaccgctcacctgataagcatgctccgacagcaaacggatgggatgcgcacactgagtgccagaccagacctcatcaagggtgtctatctcgacggaacaggaggtgtgactgagcctgtgtacgttaccgtggcggcgctgcaagagatggatgacgagatcgaagaatcgatgagcgacgatccgctcgacgacctacgacattgctatatcgcctccgcgaaggctctcatggtagatggcgacagtgtggatggagacgagttcgagcacgaagcaaccgagattcattttgaagattacgcacacgaactcgccttcttaccggacttgaccgcgcctgcctcgacgatcttggactatgatgcgccaaatgtgaagaacccctcactggatccaattggacagatcaagctcgtcgagacactgcgtcggcatgaagagatcatgatcgccagtggcaacgcactaccgccgcctgcgtacggcgcggtgtgcgacattgatgttcaaggcaacgcccctatcaagcaaagagctcggcgaattccgctgaaatacttgcggaagctctatgagctgctgaaagggctgctggaggcaggactcattgcgttctcatccagtccgtgggcctcgccgatcgtaatcgtgctcaagaagaacggcctcgatatacggctatgaatcgactacaagatggtcaacgcaattacgctcattatggaatatgcgatgccgttggtcgacgatctactcacagaaatggagagctactcgtggttttgttcgctggatgctgccagcggtttctgggcgatcatgatgacgatgcgtgctcggtgtgtgttggcgtttgtctgcgcgctaggtcacttcgagtggctgcgcatgccgttcggtttgaagaacacgccgatgatctaccagcgaatgattggaaactcattgtggggctacgtgcaaccgaaaggcggctgggaggcttgcgccgagcgaatgaagcaggcagaagctaaggctcaagctctacgtaaggagtttgtggtgaagtcgcagaggtcgccgagtgtcgatcgacgcgacctgcggacggtatacgaagcggatcacctggccctcgccggaaacgacccgctgatggagttggtcaacagcccggatgcagatatgttctcgaccggcgaacctgaccagtcgaagctggtcccggtgttccaccgtcattcgtcgacgacatttgcttcggcgggtcgacgttcgatgagtgcttgaagacgctggaccgactcctgtcgagattcgccgagtgcgggatcagcgtcagcttcacgaaaagcatattcgtccagccgaaagtggatttcttgccgcatgttgtcacgggggaaggaatccaggcagacggaaagaaactcgcggcaatcgctgagctcccgtccccctcgtcgaagaaaggaatgcaggcgttcctgggtgccctgaactactacgggaggttcatccagggattggccgtgtacggagctgtgttgtaccagataaaggaggacgacttcgcaccggggggtgacctcagcgttgcccgcaatgcctttacagcgttacgccagaaggtcgtcgaggcaccgatcctgcggcacttcgacggctccaaggacgtctacatcatgttgtacgccaacgagtgggcattgagcagtacgctcatgcagatgcatgccgacttgctccacccggtgcggttctgcggccgggtgctcaaggagaacgagctcaactaacatcctgcagaaaaggaggtgttggctctcctacaggtgctcaaggtgtgctatacgctgttgtccggtaagacgttgcacgtctacaccaggttctcaactttggagtgggtgttccagtccaagtcgttattcgaaaggacggtgcaattcgcggtgttcctgtcgcagtggcacctgaaggtcaagcgagtccgcgagcgtgacgtcgaattcgccaagctgctgcagtcgtcgatcacaccctttgtggcgctcgacgaagcagtggccccgctccaccgccctcgaaggggctggccccccatctgctctacgcgagtatccctcgagactatgaaggccctgtgctatctttcgatgggtcagcgaagacagaaaagcatggcgggcatggaagctgctcgtggatcctgtggcgcttaccggcttgggacattgtgatcgctgcgagtgcgcacctgccatcgacgacggtcgatctagccgaatatactggcatgaacaacggagtcaaggcggcgattgaacacgggatgaccgatcttattatcgtcggcgactccaggcttgcaatccagcaatccatgggggtgatagcctgccgggcggagacgctgcaagtcaagctgaagaatcacaaggaactcacgacgcagctcaactcagtccgctatctgcacgccataaggatgtaacatatctgccgactcgctggccacggaagctctggaaacccaggtcaccaaggtggtactcagcgaaacaaggaaggcggagctcaaagcgctcaatcgaattccagaggtgctgtatgtcgatgagcaaaccgcactggaggcagagcggaacactcaacgagcggaaaccactcagcgagcaaaaccttcaagtgctgatgaggtcaccgaagaacctcaagtaactgcagtcaccagaagtcaagctcggcgagtgaggttcgaagatcccgaagtgcaacggcacactaaccacggtgacgtgagaagtcaggaggttgaacagacagagccagaagagacgccaacccctccagaaaacgcaccggagtcggcgagcgaagcaaacgaagcgcagatgcaaacgacgacatgatcaccaacggaccagctcctgctactcctgaagaagtcgacgaacaactaaacccggtagcggtgcaagcagaacgcatacggcgagtccgtattgcccaagacgaagaaaggaggtggcccgacttgaaagcctacctccggggcgacattgagtccctcgacttcaaaagggcagccaatgcgggcaaactcgccgaccgattcgtcctggacgaagacgacgtgctacactatgtgggtaagggacgcaagctcgacgagggaggcgagccggaacctaagctgagactggtgataccgacgacgataattgaagaagtcctgcagagttgtcacgactcgatcgaaggagggcatcaagggataacgcgcacgttccaccaggtcaagaaagattactactggattggactgtacgccacggtggctcgccatgtgtgcgcatgcgcagactgcagtaccagcaagggcaaaccccaattgaaggggtagtcgccgggcaatgtgctcgccgaccgcccgttccagctggtatcgatggacttggtgacgccgctgccgaagactcggcgaggcaacacgtctatgttgctgttccagtgttccttcactggctacgttatcgccaaagccatgagcagcaccaaggcacaagacgttgcagatgttttcgaggaatatgtgttccgacgctttggtgcccacgacacgatcgcgatccacgctttatgagtgagaccttcaaggcattcttcgagctgtccagtagaggtctagagcgacgctcagctaccggccccaagcgaacggtcagcaggagcggtcggtcaagtcggtgatctaagccgtgaacgtgtacatcgaagacccactccagcaggactgggacgagatagcttagaagatggagtatgcgatcaataattcgatggacacaacgaggaaggagacacccttctacctcgtccacggatgggatgcccaatcgacactcaaggcaatgacaagttcgttgagactcggcgatggtgatcagacggacgctgcagcctggagacgcgaggccagccgacaacacgagattgctctggcaatggcgaaacactaccaagccaccgaaaaggttcggcgagcgaaagaacgcaacgaagcccttggaagaattgaacggcttgctgtaccgctcgacgaacgtggcgatcctggcaaagcaacggtcgacgaatcaacgggaaaaccggtccatcgctcactgttccagccagggagccgggtatggttgtttatggagcgcgtgaagcccggcctgaccaagaagctcgctcacaggtggcatggccctatccgcatcaaacggacggtggaggagtttgcctacgagctagagctacctgacaagaccggttaccgcttctatcctgtggtgcacgtgtccagactcaaggcagtgagcgaagatgaccgcagaccgactgcagaactgatcgacggactcggcgaggatgagaggtttgattttgatgaggaacttctgccagaggacagctgggatccggaaggagacggtgataagtacgtcgtcgaagctattctcgacgaccgatggccaatttcgacaggcactgaacggaagcagtgagagttctacatcaagtggcgagactacgataagcccacttgggaaccagtatcgaattatcgtgcggaggactactattcgactatctcctctagcgcaagcgcgcgaaccgcttcaagatggttcaagttgctgacgaagactagcaactgcgcgaagtatccctcggcgatggacacaggtcgccgatcaagggattgatgttactgtgtcacatgttgacctgggcgagggtgaggtacaggccctcgtcgagtgtatctcgactgtaccaacaactgcatgatttgatttgatttgattgatatggaaatgtggccgcgcggaaaagagaacaacggaactacgacatgcaaagagcctccaactaaactacgtctcaacgctatgtgaagctcgacaagtgtttcgcgcgacttgggccacgaatgaaaatcaggcagcgtgaacgacgttcggcggcaggaacccagccagagtcgggcgattcgctggaggcctggtcttcgggtggagcgcaggtggcactggctcgatgacttcccgttcagcctcgaccacgagctggacgatttccggatcagctccaacaggaacgaacagggggaagtccggatgcgctggacgaaagatcgtgttgtaggggtgacggccaggagtggtcaaccaccagtttcgccacggctcgttgccgtcgatgtggttaatctcggcgacccagttcttcatcttggggaaccacgggaggtttatcaacggacagaacgggacggccggatcgaagcatacttcagtgtccagcaaccgtgcagggctaccatcgatctcatgggacacagcctccacgaaggcgtccccgtattccttcatcgccaaccgcagaagatcggaacgctgcttacgttcgtggatatactcctccttcaacttcaaccacagctgggtgaacttctcgtcgagttcggcagtctgctgggaggccaaccatgcctcggcgagccagatgtagacgctggactcgacgatccagtgcattctttcccagagcactaggagacgatcccaacgaacgacgccacgagaccgagataaagcaagacttaacgcttccaggagcgtctctgctttccgcgatctcttccctttctccacgggaggaaacacatcaagcactgtgtcgtcaacgaaggccatgctcctaggaagaagccggaaaatcgtccaccaagggtgtttggggtcgtcgaccttagcgaaagcgtgaaggccaggcaagctaataggcgtaggctggattcgaacgccgtcggctgtcttctcagtgaccgcaatcggcacgcacgacgccaatatctgctcccatcagcgacgcgaagccttgtggaagaacggaagagaacggagccgctttatgtacttcgactcgcgagagtcccgactggtcgcgttcgacgcacgctgcacgagggttttctgtgagatcgggaaatgcccgctgaagaacagccccgcgccgaagcctaacggtcttgaaccttcggtgatggctgagtgagccctccgattggctacacacattccccgcgtttgagtgacagattgacagccatttagtgaccaggtacggcgggccataataaatccctgtcgtgccctcccagtattcatagtgggtacaagatttgcctctcattaggaattcggacctagccgaagggtcgtcgagttgtcggtccggctcgaagattcggctgatacttgatatttgtatagacattagggattagttatagggaaggcctcacagcctctaatcactaaatcagagcagaatttccccccgaagccacgcaagggtcaagtccgtctaccggtaagtcttagcttagctgtagagtctggatacgctcggccgacgcggggtatgtctgccggtgagcataaggtacattgaccgagtgttcatccctgtaaaggccaagagtgagtagtggccgagtgtttgaggtattagagacctccctgtacagttgtacgtttgtctgggtgtgtggcgtgccccccccagtatatttgacttccagccgatacttcgtctcggcgcccctgtcacaagcctcgattggcctggtacccttccttctgagggaccacagtgggttaagcgcgaaagcgcgtgtgcatattacatcctagccgtagctcgtggctaagggtgctctaatatttgatttacgggttctacctacctgaccgacgactcgcataaggcacattccagcccggtgtaagggaacggatctggtcttcagatttaatcccaacaataatcgccgaccttttaggagggaagcgtgttgttggaagggctcgtcccaaaagccttggctagagggacgaggactcgttaaatcgtgttttcctatacgacatttcacatccaccaagtgaggaggaggaggtccaccctcgagcttgaccctgacaacctcaggcttagattcgcccaccggagttttagcggcggatgaggaggaacgagtagctggcttcgccgacttgaccaccttcgccgagctcttattcttcttgctcgctggagcggaagcagccttgaccggaaccttcttggacggtcctgcaggcttgacgggagccttgccggtggagtccttcgtgctcgttagcgccagctgagcgaagctttcgtcttcatctccatgatcggctatgacagagctggcagcagtggtcgaactccggtcagttaattgagaaccaggcggatttaaaagaccaggtgaagcttgctgttggccgccatcattggattcagagccaacgacaggcttgcccggaggtgcgactggctggcccgacaaattgggagaagttgtagcagggctacctcccgccgaaccaacatcgcgatcgctgtcgctatctccagcgtcgtcgtcttcgtccggactccccggactccaagcaggatgcttaccaggagacaggacccggatcatgacagagctcgttgtaagtgcgggtggagcctcagagctcagcgatgctagagtagaagctgcctcgacttgcgtcgccggagaagcctcgccgaccacgggagtggcgctgaagaatacaactcctcggtaggagcctcggacgccgacgaaggagcaggagatttggctggaacccgatacgtaaagccgcccggtgaactctcaacagcaactggatcctccagtgtctcgcccacctcttcggtaactccagaggtgacagcttcctcagtagaaggcatcgacgaacggatggagtacccgcaggagcgtcatcgacagacagaacgacgggtgcttcgccgagcacctccgagtcgttgtcagactcctgagcatgaacctcccactggataaccgtggcgttcaacttggccgctcgctgagggtaccgggaagaaggcgaagggattgagtcgaccagcccagtagaatgctcagcagcagcaggcactggagctttctcctcagtcagcgaaccctcgctcgcgggactcggtgaccgtctcttcttgttcgacgagcgctgcttcttgggagcaggtgcagagccctgcttcgccaactccgcttgccgagcctcctggatgcgagcccaacgagccatccgtctcttctttggtttcttgggcgaagtcggcgaactgctggaagctggagcctcggttgactgtgctggctcgtcgtctgggtcacgggaacgacggcgcttggaaccaacgacaacaggcgatggtgagcgtgagcgattgctcgccgaaggagctgaaaccggcgaagggagactacgcgaagacgcagtcggtggggaaacgctacgagcggaatagctcagcgaacgactagccctggtcaagtaccgacctacgctcgacgaccgagcccggagacggcggtcagccgtaggagtagcttgactcggcgagcgagatcggacacggctcgacgaaggtgtacgacttgaagtggaggcacgagtggtggccctggccgatgaacgcacaggacggtttggtggcggggcagtcggtgttggagacggagtctgcacgtgctgctccacctcaccgaacacacccaagccagcttgacgaagcaagttgctggcgtcacgaaatgcatccagctgattggcttccaagccaggcataggttgacctacaacgcaacaagttcgataagcgacgaagggaacaccgagattcatgaagacaccacccgacttaccgagcatagctgcgactgccaggaaggggctctgcttctggaattcgctgaccaaggatgtgaacttcttgcagcgagtcaaggtccggatcttgtggtccttgtcagcgagctgacgcttgagccactggtgcgcagacccatctcccatcaggattgcgtccgacaattgagccaactgagtggagtgctcatagcaacggccgatgagcagctgacgattcccagcggtccgcctataatcgtcgacttgggtagcaataagccgatccttgtctcgaattgtggcttccagaagctgcttctcggcgaggaagctcttccgctcagtgtccagcagctgcatgctgagctgcccttcgttgctcgagtcgataaggcgagccgcctcctccttgagtgagcgggccagcgcattggatgtcgcagctgcctcgcggagggcggcgatctccttggctgcttcacagaggttgtgctgcaggaggtcagcgcgcgtgcgctcagcaaaggcttccgcagctttctcgccagcgactgcagcagggtgaggtccatcgacgacctggccttcaagcgctggcagcaactcgtcgattgacgacgcgttctggagtcgacgatacagctcaggagatggatccaccggtggcttggcgaacaagcacgcaagcagcttgcacattttggtctctcgctcggccatcttgtactccatccgattgccgcgcagctcgagaacgcgctccaagtcagcgagagtcagcggtcgtcccaccgacgccccagatccagcacccgacgaggcaggaaccgacgacgggtcttccgatgcagatgaagcatggaggttctcaactttcacatgaagcgaagctccatcgtccagtgtcgccgctggggaagcataaacggagcggcgcgaagtagttgctggtggtgggcttgacgtcaagccgaccgcagcctgccacgcagtgtccagagcgatgcaacgacgtgtgaacagacaggtcgacgggcaagatgacgagcgccgggggttgtggtatagcgagttctgagtccgcaggtcggtggttgcagtcagtccgggccgagtgtgtacaccagacaccgactggaggagtttcgccgacgctggatcccaaaagatctcaagggtcgtcgagcgaagagtcggcgagcgagcagacttggttttagtattggagaggccgtaacagcccattttcattaggtatttgtatagaaaccccagggaagggcctttgagcccaacaaagcaaagataaatacagaatggaatttccgaggtcctaaacaagcggcacgcggcgtctcttcaaggtacgaccaccccccgtggggctagatcatgaccaccgctgagataggctatcccaagtgacggaagtgttctcggccgcccggcgagtccaagagcgagtgcatgtagtggttatctggattccgcccctggcggagagctcgtcgagcgtacgagcgcgggttttcggcccgcccccgactcagccgatgcggttttgcatcggcgccccgtaaaaggcgagagccgccgtccatcctttggtggagggcacgggtcaaggagagaaggagaaggagaaggagaaggagaagaggcgacaaggagaggtcggcgaaagaaggggagcgtgctctgtgcacgtggcacggctcctgggacgacttggcaggtgcctgggtaaccactgcagcgctgtaaacggactgggcgatcttcggatcacccgacaagcctgcgctcccgttagtgtaggtgttgttggtgtgggagtgggaagctaacgagttttggcacgtctgctacacctcagtttggctcgatagctgtgttagggcgtaactagagcagcgcgactgtgagtcggcacctcgaagcagcgaaatgccgtcgccacggacgatccaacgtgcccatcgatccgagctctctgggctcaaatcacgccgttcgtggccaagctgtggtgctccaccggacgccagaggccgtggcttccccacagataacctcgaggcgctcgaaatgccaaactcgggtcagcacgccagtgtcaaccggtcgccaaaagcagtaggttcctggtctcgatccgccgatttcgccgtaaccaggggtccgtggcacggcagcggtggcgactggctaccgcagtagggcatgcgatggtgctgcgcggcaaaaacgcgggcggcaacgatgccagcgtgcggagcaaagacggggcctcaccgggaatcgaacccgggacctctcgcacccgaagcgagaatcataccactagaccacgaggccactccaaacagacctaaccgcctacaaaattaaaaacgccattacgcaaagccgccacgagctatctacgcacacgcacctgtgcggcacgcaccacatccaccgctacctgcccgtaccctccgatctacaaccgcatccgaaatgccgtcgccacggacgatccaacgtgcccatcgatccgagctctctgggctcaaatcacgccgttcgtggccaagctgtggtgctccaccggacgccagaggccgtggcttccccacagataacctcgaggcgctcgaaatgccaaactcgggtcagcacgccagtgtcaaccggtcgccaaaagcagtaggttcctggtctcgatccgccgatttcgccgtaaccaggggtccgtggcacggcagcggtggcgactggctaccgcagtagggcatgcgatggtgctgcgcggcaaaaacgcgggcggcaacgatgccagcgtgcggagcaaagacggggcctcaccgggaatcgaacccgggacctctcgcacccgaagcgagaatcataccactagaccacgaggccactccaaacagacctaaccgcctacaaaattaaaaacgccattacgcaaagccgccacgagctatctacgcacacgcacctgtgcggcacgcaccacatccaccgctacctgcccgtaccctccgatctacaaccgcatccgaaatgccgtcgccacggacgatccaacgtgcccatcgatccgagctctctgggctcaaatcacgccgttcgtggccaagctgtggtgctccaccggacgccagaggccgtggcttccccacagataacctcgaggcgctcgaaatgccaaactcgggtcagcgcgccagtgtcaaccggtcgccaaaagcagtaggttcctggtctcgatccgccgatttcgccgtaaccaggggtccgtggcacggcagcggtggcgaccggctaccgcagtagggcatgcgatggtgctgcgcggcaaaaacgcgggcggcaacgatgccagcgtgcggagcaaagacggggcctcaccgggaatcgaacccgggacctctcgcacccgaagcgagaatcataccactagaccacgaggccactccaaacagacctaaccgcctacaaaattaaaaacgccattacgcaaagccgccacgagctatctacgcacacgcacctgtgcggcacgcaccacatccaccgctacctgcccgtaccctccgatctacaaccgcatccgaaatgccgtcgccacggacgatccaacgtgcccatcgatccgagctctctgggctcaaatcacgccgttcgtggccaagctgtggtgctccaccggacgccagaggccgtggcttccccacagataacctcgaggcgctcgaaatgccaaactcgggtcagcgcgccagtgtcaaccggtcgccaaaagcagtaggttcctggtctcgatccgccgatttcgccgtaaccaggggtccgtggcacggcagcggtggcgactggctaccgcagtagggcatgcgatggtgctgcgcggcaaaaacgcgggcggcaacgatgccagcgtgcggagcaaagacggggcctcaccgggaatcgaacccgggacctctcgcacccgaagcgagaatcataccactagaccacgaggccactccaaacagacctaaccgcctacaaaattaaaaacgccattacgcaaagccgccacgagctatctacgcacacgcacctgtgcggcacgcaccacatccaccgctacctgcccgtaccctccgatctacaaccgcatccgaaatgccgtcgccacggacgatccaacgtgcccatcgatccgagctctctgggctcaaatcacgccgttcgtggccaagctgtggtgctccaccggacgccagannnnnnnnnnnnnnnnnnnnnnnnnnnnnnnnnnnnnnnnnnnnnnnnnnnnnnnnnnnnnnnnnnnnnnnnnnnnnnnnnnnnnnnnnnnnnnnnnnnnnnnnnnnnnnnnnnnnnnnnnnnnnnnnnnnnnnnnnnnnnnnnnnnnnnnnnnnnnnnnnnnnnnnnnnnnnnnnnnnnnnnnnnnnnnnnnnnnnnnnnnnnnnnnnnnnnnnnnnnnnnnnnnnnnnnnnnnnnnnnnnnnnnnnnnnnnnnnnnnnnnnnnnnnnnnnnnnnnnnnnnnnnnnnnnnnnnnnnnnnnnnnnnnnnnnnnnnnnnnnnnnnnnnnnnnnnnnnnnnnnnnnnnnnnnnnnnnnnnnnnnnnnnnnnnnnnnnnnnnnnnnnnnnnnnnnnnnnnnnnnnnnnnnnnnnnnnnnnnnnnnnnnnnnnnnnnnnnnnnnnnnnnnnnnnnnnnnnnnnnnnnnnnnnnnnnnnnnnnnnnnnnnnnnnnnnnnnnnnnnnnnnnnnnnnnnnnnnnnnnnnnnnnnnnnnnnnnnnnnnnnnnnnnnnnnnnnnnnnnnnnnnnnnnnnnnnnnnnnnnnnnnnnnnnnnnnnnnnnnnnnnnnnnnnnnnnnnnnnnnnnnnnnnnnnnnnnnnnnnnnnnnnnnnnnnnnnnnnnnnnnnnnnnnnnnnnnnnnnnnnnnnnnnnnnnnnnnnnnnnnnnnnnnnnnnnnnnnnnnnnnnnnnnnnnnnnnnnnnnnnnnnnnnnnnnnnnnnnnnnnnnnnnnnnnnnnnnnnnnnnnnnnnnnnnnnnnnnnnnnnnnnnnnnnnnnnnnnnnnnnnnnnnnnnnnnnnnnnnnnnnnnnnnnnnnnnnnnnnnnnnnnnnnnnnnnnnnnnnnnnnnnnnnnnnnnnnnnnnnnnnnnnnnnnnnnnnnnnnnnnnnnnnnnnnnnnnnnnnnnnnnnnnnnnnnnnnnnnnnnnnnnnnnnnnnnnnnnnnnnnnnnnnnnnnnnnnnnnnnnnnnnnnnnnnnnnnnnnnnnnnnnnnnnnnnnnnnnnnnnnnnnnnnnnnnnnnnnnnnnnnnnnnnnnnnnnnnnnnnnnnnnnnnnnnnnnnnnnnnnnnnnnnnnnnnnnnnnnnnnnnnnnnnnnnnnnnnnnnnnnnnnnnnnnnnnnnnnnnnnnnnnnnnnnnnnnnnnnnnnnnnnnnnnnnnnnnnnnnnnnnnnnnnnnnnnnnnnnnnnnnnnnnnnnnnnnnnnnnnnnnnnnnnnnnnnnnnnnnnnnnnnnnnnnnnnnnnnnnnnnnnnnnnnnnnnnnnnnnnnnnnnnnnnnnnnnnnnnnnnnnnnnnnnnnnnnnnnnnnnnnnnnnnnnnnnnnnnnnnnnnnnnnnnnnnnnnnnnnnnnnnnnnnnnnnnnnnnnnnnnnnnnnnnnnnnnnnnnnnnnnnnnnnnnnnnnnnnnnnnnnnnnnnnnnnnnnnnnnnnnnnnnnnnnnnnnnnnnnnnnnnnnnnnnnnnnnnnnnnnnnngatccccacctgtgcggcacgcaccacatccaccgctacctgcccgtaccctccgatctacaaccgcatccgaaatgccgtcgccacggacgatccaacgtgcccatcgatccgagctctctgggctcaaatcacgccgttcgtggccaagctgtggtgctccaccggacgccagaggccgtggcttccccacagataacctcgaggcgctcgaaatgccaaactcgggtcagcgcgccagtgtcaaccggtcgccaaaagcagtaggttcctggtctcgatccgccgatttcgccgtaaccaggggtccgtggcacggcagcggtggcgaccggctaccgcagtagggcatgcgatggtgctgcgcggcaaaaacgcgggcggcaacgatgccagcgtgcggagcaaagacggggcctcaccgggaatcgaacccgggacctctcgcacccgaagcgagaatcataccactagaccacgaggccactccaaacagacctaaccgcctacaaaattaaaaacgccattacgcaaagccgccacgaactatctacgcacacgcacctgtgcggcacgcaccacatccaccgctacctgcccgtaccctccgatctacaaccgcatccgaaatgccgtcgccacggacgatccaacgtgcccatcgatccgagctctctgggctcaaatcacgccgttcgtggccaagctgtggtgctccaccggacgccagaggccgtggcttccccacagataacctcgaggcgctcgaaatgccaaactcgggtcagcgcgccagtgtcaaccggtcgccaaaagcagtaggttcctggtctcgatccgccgatttcgccgtaaccaggggtccgtggcacggcagcggtggcgactggctaccgcagtagggcatgcgatggtgctgcgcggcaaaaacgcgggcggcaacgatgccagcgtgcggagcaaagacggggcctcaccgggaatcgaacccgggacctctcgcacccgaagcgagaatcataccactagaccacgaggccactccaaacagacctaaccgcctacaaaattaaaaacgccattacgcaaagccgccacgagctatatacgcacacgcacctgtgcggcacgcaccacatccaccgctacctgcccgtaccctccgatctacaaccgcatccgaaagatttaactgtttacaatacgaaaaggggtattcggtattgctgcttgcaaatagtttgtcctgtaaaatagacctctaaaatagaccacgcctgtctctgaatatgactttacacgagataggcgaggctgttttagctttgtgctttggtggaggccgcttttaggcccagaaactcggtttggccgtctagaatggcatttctgcgtttccaatcccgagaaatgcgttttggtcgggaaaacagagccccaagcgtggatcttagaccagtactggcgttatatataaatcagagctaggtattaattaagagctggctggattaaaatggagattattaacgagataataggcatgcgttggccaaaatatctgcaaacggcaatatattttagtaacgttacgttcgagtaatcgagagggcggcgaagccgttgctcgccagcttcgatactaaggcaacaccgttgaaaatccctcccagtattgataacttattaatactggcagtggtgttgccttagaatcgaaaattgccattgttgcaatcgnnnnnnnnnnnnnnnnnnnnnnnnnnnnnnnnnnnnnnnnnnnnnnnnnnnnnnnnnnnnnnnnnnnnnnnnnnnnnnnnnnnnnnnnnnnnnnnnnnnntccgcggttttgatgctgaaggttggtctgtgccatgatgttgtgtcgttggttacggggttgtatttgtcgtgccacattgcaccgcgtgaagagtctgttgcatgagtgtaaggcttttggtgtcatctctctgtcctgtctctacagacaaccaaatccagctcctggatgtcatctattcgcgctggaccggagctatcaatcacaagaggcgaatcagcgcattggagtgcaacggggtttttatcggaatccacaaacgagcacgcttttttttcttcctttgcctacgaaagtgctgcttaacacgagcaaaggcaagtttagaaacatgatccagtataaatcctcaagtgacagggccagcctgataattaactcgaacgagaatcgtgcccagagcgaagtggacttgtcggaaaaatatatcaacggccgggttcgaaccggcgaccttctgcgtgtaaagcagacgtgataaccactacactacgctgatgtaacatttttacttgttaacccctccgtcgcatggtccggattcctatacacggactattttttcacatgcttgatatcaagcatgttaaagaaagcctttacttggaatttgtatagatgaaaaaagtacaggaaccgtatctcggaacaaagtcgattcagctgacctgtttatgagaccacatgctgcttatcaagcgttgttcaggaaacccgtagagcccatgtttgatgtagcggatatgaatatggcccttttactaggagtgggttttctttgctgctagacgagtgcaaaacggctacgaatgcgaaattgtgtcttgaactagagagtgaaacgcgtgacacgcaagcacctgcttgcgtagttacgccgcgtctgctctacctgtacgtagtgtagcgcacacatttttcagcacttcttcattctcatgacatggcttcggcagtcgccatggacaccttcctctccacggctacggacacggtctactctttcttgactgcgccttcgacagtggcggcgggcacattttccataacaaagacagtatgtctggtggcaacatcggcttcttcttcgttgtcgttgtctactttttcgtcttcaaaagcacttgcacgccttatcccctaagtacccacctgcatgagatcaagcatcagcccaaccatttacctgcaggatgtcaagcatgcaacacttataacgttgagcaatagtagcacttggagtcgcgtattctatttgcctcaacctacatcatatacacctcttgtttgaacattggcgaccgcatcaggtgcgaagcccctacaaacacaacactatattattatcaaggcggtgccatgcataacatacaactatgagatcacgaataactttattgaccatacattggcttcaagtgctccacaagcgtcgtcatggttccctattgcttcaaaatcttggcacgaccagctccgtacttgcctgcatacgattgcctgtccccgcggcgcctgagccggcatggtctgggctgaatacgctagtctcgttggtgggtttggggccgcagttcggacgagatggtagtttcaggagagaattatgtatccacaggcctgtgacaatatgacggatatgcagcatgcagttagaaggtcagtccccgccgtgctagatatgcatggtgtgactacatacatagggtggactgcgtcggcgcttgctgctggcaacgtttcatgcgctgggagagagtttgtccttgcttgtggctgctgtgtaggcggtagtggcgacaggggtggtgaaagtacaagtacacaggcacagacagagtaagaacaagcaatacaatgcctgacgctccaatcggcgtacctgcttgggtcaactcttgctgcatgataccgactgcctcccgcgtctttgtctcgtcccctgccggcagtactgttgcgttttctagtccattatatcatcgtcatttgaggttgtctgagagcatacaagtagttgcaccatcatatacaatgtcagaatacacagttggtgtgctggtgtttgcggtgcatgatcttactcgtccgtgccgcccatatctgcctcgatcctggtgtaccgtcatcttactcgccgtacccgcgcacgcgatgctctagcttgatggcatctcttcgttccggtcgacttagcgcggcaaattcttaaatggctccggtggcctccacccgccacccaccgcgagggaaagcgtatgtaccgaccatggtcgaggtggatacatcgacctttctttctgccgttggcaccccaagccctgtgcatcgagtaccaaattggaccaatcgaccagtttatgggcttttcacatgcttgatatcaaacatgtgggaacatatggccgctatatggtaattttaacatgctgcttatatcaagccttagtgacggggggagggttaacgcacttatattgctacttaacttaatctgacgcaaagtgtgtgtgtgtgtgtgtgtgagagagagagagagagagagagagagagagagagagagaaatctcagaggctctccagcgaagcgcatagatcgtgataatacgcgtggtagtatttatgtgatacactgagcaacttgcggttaccatttgctgagagaagcatgcgtgcagagcgcgccttagctgaaaactgatgaaaaagtggagggagtttttcacaacgatcaaaagctgtggcatagatataacagataatgccgatttgtatacgatacataattcctgtattatacctttagttattgtgaaagccgattagaatgtcttattggattgcaaatcggctgatttagtggcttattaagatttttcgttccagatttactaaatccgaccacttaattagactggggcacatcgatttaacctcaagattattagcaaggatgacttgcagagccaaatcatatgcatcagatttaggtttgctaatcagccgatttagccagggccggccgatttgcttgctattcagacggaatgtccaatgtgcaaccggtattcgctccttgtaggctaaatcagccgagcagacaacaatcgttgcagtcgctcttggctaggtattatagtcaaggttacaatactaacagcacaactgtattgatcaggaaaagccgcaagctataatacatgtaactgagatatgcaagcgacgggtttaagcgtggcgttgccgctgcactcgggcctaggtggtgtatgttgatcgaaattgctaggctgcacatagttactagaccgatgaacgatttatactccgattataattgacacatccccaatttagcagcctccgaatcctctgagagcgatgctttactggccaattcagcaggacaaactaatcggttttcacaataccaaaagatactcaaattggaccggaacactaaatccagtcttacacagactcttcgctgtctcaaatcgtgaattcatcgaaacagttatcactgaaggcgcccccgttgtcgttcacgtcgtcagcgtcttcgtcaacgcgctacttccactctgagcaaaatagctcgccgtaaaggtcgtgtcgcgccacatgccaatatctaagccttggcgaaacccagctgctgctaccgagcgctccatgacgtacagctggaacatcgcgccaggcaacgttcatccagttcgctacggtctcaaccgacggtggcttcaggtttcctccgcgggtgtagagcacagcatcggacctcttccagccctcaatgatgggcgacaaattatccttgagcgacttatagatccaatatctcccgcttgcaagtagggagtcaatccgcccgggatgacgaacgtctgcaccgctttcgcgatgcaccgagcctttaccatcttggagatgtgtgcacgcatgttgtcccagaccagcgcttttccctgcgtgcatgtgtcgaaaatgagcgggaacaccagatccagccaacgcgtgagaagcgccaggtcgacccacgcatttggctgatttacgacgtagacgttaccatagtgttcgatctccccatcctgcttagcccttttccagacgaccagcgggggcagcttgaagccagttgccgtggcagcaagcacagccgtcacacgcattgatgcaagtcccgtagactttagcacgatgtgacgagcaccaatttagtctaccgtctggcgacgtgggtcctcaaaatagactaccgtctcgtccatcaggatggcgtgatcgtcgctaagcccatcgaggcgtggcgtgagataactgagaaaactcaccgcgcggtcggtcaacacatcatcggtcagcacggtaaggtttgtcgtgcggcacagcaccagtccgtagcgacgcatgagcacgttgatctagtggtctaacgcagcgaaatcagcatcgtccagctcagatgcggcaagccgctgtccaacgtcgctaatccaatcgcgggagacattctctttcgcagaccggcggaacagcacttggtcgaacagaatatcttcgatcacggagaaccgtggcttagcacctgccctgctcagacggctgcgcaatgctggcgcggcctgtgcgctgcttccatcagtagggcacctgagcttcggagacattccagccgcgctcgttcttgtagtacattgcggcaggggtgggcacaccgacgttttgctcgatccactgaatgacctctttcttctcggccattgacttgggcatgtgcgatgagagcatcttcactgggagaggtttggttgtgggttcatttgtagggactggtaaacccagaagaagagaggcgaccaagaaaattggtggctgaggtgaggatattatatttggtgcggtacacaattatttgacagtgccgggcaccatcgagatctcgtttacgacccaccaactatttgataccattgaaaagaggacaattagagtgaaaaaaattagaagagatcaacttcagaacaactctagttgccgatatatccgtttgtatgcgattcgctatttaagccgccacaggtccaccttttgcgccgaaaagtcgtcccatatagatgtcctctaagccttattttgggccgatatagatacccaaaatactgttttgggcatatttcgtctgcttgtgggcgatttgaacatgacagggatcgcagcttggcgcagttttatggacattacaaagccgtttctgcacgaatgaagctgtttttgccatcatagtaaagctcacgtaaagttctactgattggttcttgattcatgcaaatcggacaaatattgacctcagcagccctatttaggggctcgatgatgtccagcactgtgagtgccggcaagatggcacacaatttggtctaggtacactatctggaaaagtactctattcggcattatccgttagaaaccaagggtgctgtttcgtccacatcgtggctgttcatcgtagcggcaacatcatcgcggggcgctaagaagaaaggagcaacatcgacgccgtgatggttagctccagtggggctcaagagtagttccaccgatctgactaaattaaagttaaaatgtggaccacattgaatagatatcaatttgttctgttcgacaaaagctgaccaaatccaatttgatcgtcatacaaaaaccaagtgcaccggctatccgctggctaaatttgaccagtggataacccaaaattgacccttttctaacaccgactatcggcctcctgtacgaatttatcgcgccctgaaccttttcccgtttagcccaagttttagtcggaccggtggaaatgctcttagcgtaagctgcggaagggtaaatatgtcgttgcgacgcacaaactcatcaatgtaatctgctaatgtgcgctaatacgttacaaaactaagttaaaactgaaaatgtactgacacgatggccgagcggtctaaggcgctggttttaggcaccagtcttcgggcgtgggttcgaatcccactcgtgtcactttttccgtgaaaatgacctatcaattatcttttgacaaccgtaccccgtcatattagtgaacggtaagcttcgtggtcatcgtttgacttgatgtaccacggatataatcctatttggtctgcgattgcagcattaacgttgcttcctatgccagtacaatcgcgtactttgggatgcccccccccaaaaaaagcgctaacgatgatgctttcgtcaaggctcccaggcggcgattgcccgcctttcagctgccagcctcttttccggcacagttttgacttgtcctcctccacaagccgcaaagagtggatattttgctttagtgggcatataagaccaaacgtatagcggctggcagacggagatgctgttggatgggagggggcacactttataaaaacattcattagcaactaattcctgtccctcaatagagacgtgaaagtcaaagtatgtaaaagaacagcaggtggtccttcaagctcgtttctcagcaggcttttcacgtagaattcccagacgcgagcgcttccagccgttttcttggatgacgtaatagtgaccctttcgatatttcttgagctcatttgtctcgatccagcctcccgctttgtccttcaaaacgaggagaatgagattttcccctaaaacatacgcttcttaacattttttcggatacatagaacaccggctgtaagagcgctataagaggataccagatataagtgctctcagcgatccccaaaacatccaatagtcaaatcaagtcaaatcggctatacgactataatagtgtaagagcgcaatccttaaagagtccccatacaaatatacaggacgaaacgtaaactttataagacaacctatgtttttggcctctatgaggctatattgtactactatatatgataaatcataggtgaaggggagggcatatacctagtcatgtttttttttccttaggggatgtttcattcaggggtaagaataagttcagtggaattttagccaatcggatcttgctaacccctcaacgccctagattcaccaagaaacatgttgtacgtacaaacatgttaacacatgggcggattagctgcataagtcaggcctgcccgcacaatgcacagggcttgggttcggcggaccagattacaggatataaacggatataaatcgtgcgaacgcatgcttgagtaaatacaaagcgatgccgttgctacgtcgattcgttttatggtagaaagaaaccgctaccgaatcgacaacgattccattacctgatattttagcatgtattgtgtaagttgaccggtggtgtattacttgtaactaactgtgcacgttatagaggaccccaaggaagtggcgtaggtagtgtagcaagaacagttgtgccaagttgagcgtgaagcgtgttctagcgtacataccggcatcctcccggatacgttacgaggtaaaatggtgttttgagagggaattagaaataggatagtgaatcgactggtatttagtctgcaatggaaccagaggggatatacaaagaccagattgcgcaggtgtgtggacctctgtagtaaggtggtagaaatttgcgaaatcatgtggaggtgatagttcgaggctacaacgcgctaggtttatgaatgtattcacttgatgcctcgtcgctttcgtgcgaggtggcgtgcaaatcactctgctttgcactcccttagaggtccttgcccagtctcttgataaaaaagccactgacctctcattacaagttcttatcacggtgtccatatacatgctgtttgtacaacatgataaacaatttggcgaaatggtcatgtcgtcgttgtacacagtcgatactcgacataaccacttgggaggcgaggacgtagacgcgctgcttatacgaggctatagtaaaactaagtgttgcgcgactttaacatgctgtacgactatcatgttgggcgagtatcgtgatataaaaaacaagtaaaaaaacagcttgggcgctgaggggcaacttgatacaaatatatcccgtcaaatttgtttctaacagataacacgagttttcgattgagtggtcggtatcaatgtacatcgtcgctcatattttcccatcagattgccatttttatcggtgagaatggcagactgtcctccaacaccaccgcgagtccagtctcctggttctatcatgcggcctgcactcttgggtctccctgcgggggtcccctcccacacacctccgtcccctcaggtcgattcgcagccgtccaacagcgcaacagggatgcggccgccggttcctatctcgcgatgagcaccgaactggatagtcaaagaggtacgcgaatatttggcttagttttatcttaaccgtctactaagctttattgcaatcgttactacttctgtatgtagaccaaaactttgcttcgtctccgttttaagagatgctcaagctttttgcacgccagcgtggtatgtagtttcgttttacgtcatctccagcgaatacttcgttgcgttagtctcggctgcatagccgtaataagccgaccaacgacgtcgaaggtagctcgtaagttgcttgaagcaagggcgactcattctgaaagctcggcgaaaagcttcgtccgaagcatcataattgatttgaaaatagttgttctctgctgtcaggtcttgttgcgcttcactctttaagcttcggccgtatgcagcaccaacggcagcgaccaaggcagctagcaatacaacaagtacaatcacaagttcgtctatattcatagaaaactagtcattgttgcttgctagattgcgtcgcctaaagtgtcttgtactgggttagcagctcggtgggcgtgcgcttgaccggcttttcctgtgcgtccgtggccagttccttctcggacaactccttctcgggcgacgtgtcgtcaggcagcgtgtcttcgacctggacctcctcggcaggcgtgtcgttgagcggcgcgtgctgggccgatgcgtcctcgaccagctcctcgttggccggcgtgttgtcgggcggcgtgtgctcggtcggccagtgctcgggcggtgtgtgctccgggggcgtggaccgggtgatgcgtccttgtccagctcctcgttggccggcgtgtgctgcggcggcgagtgtccggggcggcgtttgcttgggcgctgaccaacgcgtgtggtgcccggcttttttgtttttttgtgaaccgttggttacttctaatacacttcgatacctaatagtcgctttgttttaatagttcttaaagaccctcacctataggcggccttaacttatccccatcctcgaatgaaacatccccttacaggagcaacatatttataagagagataagcaggggtatggccaaatacctccactatagcaggagttctctgttatacgtgaagtgcaaaaaaatcgtatcgtcagcctggactgtgatgagagctgtaagccggccggagtgtttcttcagattcttaaccctggcagagcctcgccgcctcatctctgcccacgagcgggtcagcggcatataaaaatgtacactgctttcccgcggttcgtagccctcaaaaactgcgtttcgatgagatcgtcgtggcttttaggcaagtacaggcttttttatttgggggggggtgctgtaagaataaaaaagttaacagctgggattttcaagttagaatacggttttgtacaaaaaaactgcaaatacctgcaaatacctgcaaaacgccgacagagcttcattgaggccgccatgccgctcggctcattcttcttgtctgccatataatcttggagccatgccgcggggttagccttgatgtaatggagcatgtgggcggctgacagcacctctcacatcatttacatatcagttaaaaaaagattaaaacatgtaggtgagcaactctctcaaaaaagggatcgatccccgccgccctgacccttcggcgtggtgctcctcgcagcacccttgaaaccgcgaatggtcttctttttgcccctatcttgtagtgcccatcgtggcacccaaaaacagaattttcaaaatgcatggcactttcaatatcatactttctctggaagggaacagctggtgtaatatataagtttttacatgtatatcaatactaactcaaatttcgatttaaggactgttttattttccaatggtcctaaactagacgtagcgaaaccaccccaacggatagttccatgataatttccacgagcgtggctagcccatgacttcttgcagcctcatttccgaaatggcggcgccggcatcttttccatccagcaagtttggcaaggggcgtttccaggtcgacgacttcgacctccaggctccacgaaagttaggcctgattcgtgaggacgtccatgttcactgtgaagattcggcacatccagattccgggttcgcatacgactgccaagccaacgggttttccttacagaaggccctgaaaggaactcgccatcgagcgcgggtttcagcttgtgaagcaaagcgttgtggagctaaacaacttaagaaacaccaagcaccagtgcaaaaagctgaacggcgtccaagtttcgacagcgagaccccaggaaaaggctccagtgcccggttttatcaacgtcttcgggctggacaggaagtggaaaattatgagggtgactttcgtacacaaccacaccaaacacgtcggctttacccagacaccatgtgttgagcgctcaatcgcgcgctcgactcgggctaagcgtaacataacccaagaaatcgagaggctgactctccttgtgatgaaagagatgctgccagctgacaaccgctccatcgacacgctcacccacaaagcatcaaggactttctcattttgggggagggggtctcataaatctttttgtttcgaatacgtccctaaacggacgatcactaccaaaggaacaaagagtgtctggaatcgctctgcgatcaaagctaaagaaagagtacctatgatgttgcttggtgattgttgtggcaataagtttgatccgttcattttgttcaagacatcgccttaataattatcagtaggcgagctgataatcaactgcttcaaaatgggttcgggattactatatggcatgaagtgcaaaacctgcaatagaagcatccttgcaaaaaattgggaaacaaggcagcgtggtggaacaaggactttcactctttttttaataacatttcacatcgcgatgacaatgtcgtattgccttgggacgattttagcgctcattagactcagtttgttaaggactatgcagagtcactcaatgtattttgctgaagtcccccaagtatacttacgtttgccaaccaactgatgtagcatggaataagcccttcaaggagcagcttcgcgcgttatgggttgatagaaggagggagtaactgatagcttacgagtaaaggagcgacataatcgcaatgtgaaaattgaggcataaatgtattcgcaagacggatgaccagcctagcgcgaccaaaaatattgctgctctccggaacaacttgacaaagagaaatttgtattggttgctccttctcgagtcgatatcacacaatggatcatgtcgtgatggggcaacctttcgaagttaacaagcataggtggattcgcaagagcaggatttctgacacatactcgagtagctgcaccgaatcaagacaacgatgttgatattgacggtcttgtgaccgagttagaacatcagagatttgaaacaattggccggaacccgggtacccatcgggaccccggttcccccaaaactaccggtacacatgtatgagcaaatgcattgaagtgttggtctatgacctacatagaacgcagctgaagctcagtaggggaatggaaggttaatttaccttcgctctcgtcctgtgtctctccacgaaaatccagtcgcttgcctggtgcagcggtacagtgcttcccggtctcatcgctatcctcctgctcatgaaagataaacttggacatggtaaggtatgatatttgggtctattcagtacctgtggcatattttgagggtagtccttcatcgacagcacttagatatgagggtttaacttgcccccgagggtaccaatatggaggccaaaaattaaataaataattcgtgatttggtcggtatcatttgcgggaacccgggttcccgccaattgtttcatttgctgaagacgaaattgcttcggattatgtcatcagcactggtgatgacatcgacacggataggggcattgacacgggtgatatcggcgctgtgaacgacatcggcattgcagttgcgaaatcttgctacgactgtaggcgtaaaacccaattcgatggcaacatgggcatgtggccaattgtggaatacaagacagccgagcggaaatccaactccgtgcgtaaggtagcattgaagctaaggacgtaaaaaaaacatgagagcaatctacattaaatgctgaagcaaaatgcacttcttgcgatcagccaattttgaccagggaaaaaagtgagtacaagaactatttttccgacaactaactgcgctgttaccgtaataaacgggtccagtgcgacaaacgctttcagtgcgactacggcatatatgagagtgacaccccctcccactcccgactagcatatggatcgcagctttaagaatgagaggcggagaggcatcctgccggacgcaggtcatcgcagcaatctggatttaacacctcgtgggtttttttaattgacttttgacctaaaaatgttgtcgcactggacccctttattacggtatccattgttgtaggaagaaagaaatgtgtaccaaagtccagtaagacaatcgctttcagcccttttggaggcaagatgagcattgcatgaatggctgtcagaaaaacaacaagaatagtaactacgataacgtggaaggtcagtattgcggtttgacagcgaaccacaaatcgcgggattgagatacgataacagtactgaactgaatgagatgcatatctagcaagtgacagctatgccgctttgcttgcgacttcgcggcgacactaatacacgactggaaccccctgctgcaccgcgtttagctcgtctggatgactttctgttcgaggcatttctgtacgtggagaacgcagcagcgctgccacgctacaactcagcgcgtaaaaaccggaagagcacagcggatgacatacaaggaagcagatactctaaatcagacctcctctaattgattattatacaggaatgcctcgtaagtgtgcagtagtaccaagggcgcacgcgttcgacatcagggggggggggcaacagtatgtactgccatccgagcgctcatccgtgttggtgtgcttgcttgaaccagcacaaccagtacgcagaatcggggtcgtatagtcctcttctcgctctttccgcttagtgccacgctatgtctcttgacaacggctttatctgcactggaatagagcatctgtgtggcggaacactttacggaaaatgagaacgattgattgtgatctgatgggacgggatctaccccaccaacgatagatagatctggcgtttatgctttacaacccgacccaattgtgtaactgtctcagcggcgagggaaagggagtgatggtcgtgaccacgtaggtgtcgaacacaagtcatgcgtagattggcgagcagtgacgcggctaacggtagaagaaaactgaatcaaagtagggacccagtctaaaggtctcttatgaaacgagtagtggtggataaagaggaatatggtgtagatctgcacctaactacaagggcggggtacagtacacacaggactgtgcgcaccaaaggaaggatgtagtgcagacaacgaatcttcgaggactccagatcgaaggccaagaagatcaggatcgaggcccatggcggcgcggatctgaggcccagatcacccgattcggatcttaccggaagacaactgatctggatgatttcggtgatgttctgtgaagtggcggcaggatgtcggcagactgacggtaaagagtaggtaggcattgtaaatgggatgccagtattggaatataggatggcacaggtcttaaccccagtgagcctggccgtaggaaaaaagaaaggatcaaaagtttaactctctttacagaaacgactacatgcaaataagagtatctgaagctacgcacacaaatcctttttcttcctctacaagatactagtgtccacttggtgtctctcattgtccatcattgcgaaatttccgcttgaaaagtgtctctaaaatcttatcaaaaatccagatttatcctatccgctaggataaaaatcgcatttagacttgacctgagtattggtctgaatacccctagaatcctatacttccaacagttgctttgccaaatgcgacacggcaggtaagatgggagactccaccgatacaaacgccaagtcatttgttatcctacggcggccttgataggataaaacgacctgtgtgtgccacatcaacaaaggatttgaatttttttcgtaggataaatttcactgggctattaaaaagagttgaatttgccttgaacatcacaagtgccttcgccatcgtccggaaccggaacgagattggtccaactaggtgtagcaaggttaaagctagcagaactagttctgatcgtaagtttggattaatgcatttacgagatcggaaccctttctagtgatctaccctcaactgtagatcccagatccaccggacttctcggcttggccgctcggttcctcaaccctcagactaccaacgacaccgttgtaggagacggtaagcgcggaacgggaaaccctacaaaggcaaagaaagggagtcacaacatgcaaaaaggcaaccacacgaccggatccagatccaggcccccagatccaagcggaggctcactcgatctggaccacaagacggatgttacccagatcaacatcgtcgcgctacagcttctccgtcacgcagtcgaacttctatatgtgcttcggcagcctgagaagcttgcggtgcgatgcttgctccagtcggtaccagctctttgatcgcttcggtagtataatacaaagcatttagaggttgaacgcgtaatatacggtaagatataatggagaaacaccacaagccctaaatttcaagcgctacaaagttatctaaaccaagtttaactcgtctactagaacagcgaaaaccgggtaagtagcaaggtacatacgtttatcaacattcacagaattataaccaagataggcggtacctttagcaaaatcattaccaaggcagctagataccttcaccaaatgaaacccaagatatctgctttcagcaacgtcgattagaatccgaaccccccagctgttttttttaaatttaatgggtacactcactacctacactccaaactcttacagctcaccacagctcgagttgttcatagtgtcacttctaaaataaaaacgacgctccgaacgtgcttgctcgacgataaccaagctggtcattgcgtttagaaatcaatcgattctcgtggttaaacgcgtcttgcatgaggcgagcaagttcttcagtgacctgtccgtagggacggtaaatgttgaggatttcaagctcgtctttgtggacatagacgtaaccgctgacgtgtccacttgatcggacgaaagtcgccacaagccgactgcttcttacatgaagaacagattaggtagggagcggccttccctctagtcacgtccacgaaactggccgacgcaaagatgccctgaggaggatgaattctatcatacaaacgttacgatattacgacaaaaaaggcatgtatactgagcatacatagctgcaaaacattatgtatagaccgtgtgtgtgtggtgaatgggggttaacgtaaaggtctgattaaagtaaaatgcaaaaaatcatatcccagttacctgaaatcgggagataccagccgcgttttggtgtgttacctcgatatattaatcgtggtgccatgaaccaaatactacaacttgatttgtagtattactgaccgatttggggcgatacttctttgcgcgccactaactgatctcaagacgccgtcacccgtggctcgtggcatcgagtattctatccaacttggcgctcgagaacggaaatctgtccgccctgcaaagcacttgtctctacgtaatactggtcatcaggtacattgttatacatttcgtgggcaagaagcagatcattgtcacgttccacgtgctgcagattatcgtgaacatcttgggaagccatttcaaagccacttcgccgtcacggcgtacagatacacctgcaacgtgacgctgagtctcattctcaaaatgaaggttcctttgtgacgatcttctgcatcatgtctctcaagatgtgcaccgcgcaacacaacaacctgggcgtgattgtcgcgctttgcgactccgtcgccaacttcgtgcccggatactcatcattgaccaacggtacctcgagcaacgtggcgtgcggcgaaatgcgcgcaaacatggccgccgcatcctacggttcgcccaacaccagcatccagaccgtggtcaagacgcacgacgtggactcgaacgccaagtgactggtcttgacgtttgaattcatgaagtgatatcttccgtgttccagatggctgtacgcatgaattacactcagattgaaaactcagaaagtcgttgagcgtatccggcactgcctgtgcgcaaacctgacaaagagaatgagtggaggcagacgatttactttcgaccggtgaatgctctcacacaaccacttgcaggtggcatgacgaacaacaacatgcatctgaacggtgtaagggataaggagcacaaacaaactgcagacttcatcaagagcttcttccaaatggctcttgcagctgaccgtgaagagggcccgtcgtacatggcagctgatggcgaagtcgttacgccgactcgcctgtagcaaggctccgtgggctcttccctgcacttttagcagtcgatctaaaaattgatgcgcgagaagaaccttttgtttgagcagctcatttacgcaaggacaattgatggatttcccgagattgttgatataatttacgcgcagttggagaagtatggtctgtttctacgcatggacaagatctgtttgtacaacagaaccgcgaagtggtgtggccgcgtgctgaccaaggacggtgtggcgtatgattcgagtaacatccaagctctcattgacatgcccgtgctcgccaccgctggagcactacagcaatcctgtgtgctgcggactggatacgtagcagtctagtcgactttgctcgggtctgacagcctctacaggcgcggctggacaaggagctggctggcactcgccgcaccaagcgagtggctagcaacatctccattgagttgactccagatgagatgtagagcttcaataacgtgaagaagctacttcagaatgctgcaacgcttgcatcaccagatccagcaggcactatctgcaggtacggtgatgcgagcgacgaaggctggagcatccttttatcgcaaatgagggaccgggacaatcgcgcaccagtcagcgaccagcacctaatctcttacactgcatgagcgggatttttcatggcgcctctaagaattggagcgtcatcgacaaggagggatacccgattgtgcacgcatgctccgagctggactacctgctcatcagagacaagggattcaacatgttcactgaccatcggaacctcatctatattttcgctcctggcacggaaatcaagaatcacattcgtgacaagcttctctggtggagtttgaacttcagtgagtacaactatttaattgagcacattgctgatgaggacaatgtctgggctgacatgttctccaggtgggctggtaaaaaatcggctacagctcgaacctgctcgaggaatactgcgacgtcgtctcagcttcgccccctggttgattagtaatggccaagcatcgatggcattcgtgacgctcaacggggcaaagtggcgcccacctctcatcacttggacgaccaagatgtgtacgttgactccagttccaggccgtggactcagaggaagctgaggatccccctttccgcctcatgattgtggctcactgtgggacccaagggcatcgtggggtgaatgcaatggtgcagcaactggggcgattctttgacatcactagcgtgcacatcaatgcaagagcgttttgcgtagactgcctactgtgttgccatgcgaagggaggcaacatcgtccccagacagtacggcgagtttttctgatctgaggagcgaaatgaaaatatgcacatggattttctttacgttgggagctacgacgacactagcgactacattttagtgctgaaggacgactactctcgcttctgcgaactagtggtatgcaagcaagccgacgcagcaacagcagcccatgacattctggagtggaacatgcgattgggccaccacaaataccgatcagcgatacgacagcccacttcaagaacgagttgatgagttcatgcagggtcgtcaaggattttctgttgcatactgcccatgtgatgatactagaatttcgacgacgacaacagcagtgagtcgaccttctcccacttgttcaagcgaacctcaaccagacaccagtgccatcgcttgcagacttttcacccattgaagtgttcacggggctcgagtgtccgtatccgctcaagagcattgtcgtgcagacaaccaagggtagcaagcaagaggtgagcgttgaggctatgccggacagcattacgacaaaagtgcaatcgctccgccaacatctgcgctgcatgcatcagcgttggaggaggccaaaagcacacaaacacgccgcaacaaacgtagccagcgcaacgccacgtcggtcaactttcacattgggggttttgtactcccgtggagcaccaactgactggtgtcacgcgtcacgtgcacgcctctcgcttgaagtttcatgttgagagctcatttgatgtgacggaataagtgacagaacacattgtcaatcaagatgtgtatctgacggggcgaaactttgtcgagcaccgctccagtatagagcatgactacgaactgcttgtcgcgttagaaggtctcgaggacatcgaaaactcgttggagcccatcggcaaatgccacaaggacatgcgaatcaagctacagcactacatcgatcaggcgggggatggtaacctcaccgcattcgcgctgaccctcttacccagcaacagcaacccgcataaggtagcaatgcctacgaagccagtgcagccactgccgaccaagaaaaaaaaaccgtggctcagctacagaaagacggacaaggacatcgaagaatcgtaaccacagctggcctgcattggtgggctgtgtagtgtgcggatcattggcctatccgttgaccgatggataccgtcgttgcaaaactacgtctagtggtaagaagcggaggaagcgaacacgcggcggttaccatgggagttctaggaaagagcacacacgagtagctgtagctgaggctaaccaactaatcaacatctgtatttgcatccaatagctcgagtagactagcagtaaggccaccgccgacccaagctcaagttcaggcttctgttatccctgttggctcgtttttcttcgacggaacagcactccaccgaacgtaaatgtagcctttaagaagcgcagaagcgcaagtctaatccagaatgcacctccacaccaaaggtaaaccacgaaaaacacaccatccgaattcagaatatcacgatttcagggtccaggatttccatcaattccagaacgtggcactccgaagacaccttacacaaatgccctctttagctcaataaaaccaacaaatacagagtatacaaacactacaactagccgccacctagtcttttggacctttggacggtgggtcacacacattaggctcactcgagtctgaaactcaggggcctagctcccctgaaacgcatacaaaatgcgtactacccccaatacaggaggaacatactagcgctttcagaaatcttcctttcacacaagcaatcaatacaaaatactggaggcgattacctagcaccccaataccctcttaaaataatatgaagcggactacaaaggaatagatgtgtcaccccagggcgctcaaggccgtcgctggtccccacctaactggacttaagtttgatggagcgcacacagacggctgtccatgccgttgatatgtccttagcgtcccacgctcgtagtctcaggtcctccggatttcggtcggcatgcttggctgaagttactagggaaaactaaaccctgtctgtcttttatcagctactcctctctctctctctctctctggatttagagagcctgagttcacggtccgactccagaaaaccgtctagaaatcctgggtcaccggcatccaggcagatgaattctggatttccgcgcggcaccctgggtgtcaagttctctccatcacagactcacgtgtatctcaccaaatatctggccgcctgcgcatgttcacgggggtagtagcggggttttagggatttgatccattgtagtgatcaggcctgcagcaagatgaggtgtactctgggatacgtccgccagagacactttccgccagattaggcgcccatcgtaagggaaaattggcggcgggactgagtgttctctggaatcctgggtgtgcactcacaggattcacacttccagcaagttgggccctatcccacggaatcacatctatcccgcaggagtcactcttgccacagcagtgccacatccaaaccatccaccaaacaaaatcgaatacaaactccaagtcgaaagggtgacgacacagtagcgggctgcattcgtgttcagtggcgtggtcccgtcgtccatgatccaacgactgcacttttcccgcagttgccgtggacagtttgacgaacagcagtgacagcaacaacaccaacgctgctactactataacaactgctgctaccgttgcctatgccgccgttacgccgttggatgccgtcagtgttgttgtcccaactcatcgttggtattgttcttccggttggtgccgattcacgacctatcgatgtcaatgacagcgggtaacggctttagttgttttcgcaagtaatacctagactaccgcctcaaaaattggcccatagttttattcttaaaaatggtcggccttagtagccaggtttcccagattcagaattttcttagaaaattgattccacagatattatccacgttttattccagggaatctacagatttccctaaatcgtgcaagaccccatcaaagtaatctatgtgaccggcataaattttctgaccaggtacaatggggtgaaaaacctggaatagttatgtgtgcggaactttggcaaaagtggaagtgactgcatccggcttgtgtcggaagagctcttttccatcccagctcaggggtagaatccggatttcgtgcaggtatcgatacctgcaatactcatatgtgcgctactcgagtaaaagcgacgtccgtcggcatggcgagaagcgccaagtaaagctatcattctagtatgtctccatcacgtaattttaactgttgtccagatgtcgtccaggaagtatccgtgtattaagagtggagcctccaaatgcattacgccttcttcacttcttgcgactagcggcgatccaccttcaggattgttttcagcattgcccagcaaagcatgatgatacccgttggtgttacatcacttggagcgctatcgctgacacaggtccagaagcagcaacacacgaataccactgcccgactgaagagactcgacccccttgacagtcgtgtagctgggcgtagtcgaatcagcagtaataatctcacttgctatcttcttcaatcgcttcttattacgcttgccattcttgatgtcgtacgtcttcccttttttggcatcttggtcgacaatgaggcatcttcagcaatatttcccaaatttgacgggtagcagctcaaacgcatgcgtcgaaacatctgcatcgatgctttgggtgaaagcaagcccttgcgactactttttcctgtttagcctcgccatgaccttgtgacgtggccaaacttgccacatgattcttgtactctatctcgccaagcggtgtataatttccacaaccacctcgttgattcaatttcgccatgtgtggacagaccagccttagcaatagcctccacatagcgatcaccgtctgcaacgtcttcggcgtcactgtctggtcgatcacctcgtttttcgcaatggcgacaaacccgcaagaactctccgcttctgcggccgaatccctgctgggctcgacgatactgttcactctcgctcagagccgaggtctgtcttgaacacctttgtcaccaaagactgtacaacctcaactaatacatactctgcgatgcgattccggctgaaacatctgcaaatacaaccaaaacacggtagacatctgatcaaaacctgaatcactcgaaatatttgaccaatacacaggtaaaacctggaaaaacctgaacatacctgggccatatcgacgagaaggggatgaccagagggttgccgatacaccatcgagtgtctgcaggacagcttcatggtttgtgcgaactcacagtctctagtaaatattcgtgctcatcgtactggacggtgatcgtagtacggttgtctttgatagttatcagcaattgcggcaccagtagtgacgtcatactgcgttttgatcgccgctgctaccgatcgcgttgccataccgagtgcaatactcatctgctcacagtacgagacgtctcgcaacgtccctggtatctccaccttggctttgtattcttcttccttgcgtcgctggtaggccagtagatatttcatgcttgcacacttagtcagatcgctctttaagtgtagtgtttcagcttcttgaacatgcttttcacgcgatggttggtatgattgtacgtcatgtcggtagtggtgtgctttatttgagcctgcacatcttcttcgtacacaccatacttctttgggtttggaattgttttgtgcaaccacttgatcacatggaagtaacaaagtaacccgcgaaccttaggaaacctcttgcggatgacatcaatttcgcgcatgcccttgtcgacgatgccaatccgcacgaaacaccagcgctcgttcgcccgcttaaagtcctccatacactttgccatgtaccacagcttttcgtctcgatcagcgagtatacacgtgttgcccgtttccgtattggcccatcgcagtcatcgcgaggagctgctaaatatatctagtcgatacaaggaacacgccctggtcaaaagttggtaatacttagccaaaacctgcaaatataatacagagacttaccggttagtctgatgcgtgctgtccacttgaatcacctctggaaatctctctagcattgcgagtatatgaacactcgagaaggctatcacgccagtctcgccctgcgcgttctcatgcaccgaggccacgtttagtggtgacattcacgatcatctccgctaccgtgtcgtcgtcagatggatcaattcctagtcatcaatatccataaagtcagttttacaatctaatcatgttatcacaacaataactagtctttctcgtgcatctgtgcgaccacgtttcgagcgtctttcatcttgacgaggtggttggacttctcacaaacttagttgtagatacttgaagttccagcgacgacctcctcctcgtccgactcttcctcatcgatgtcatcaccagtggatgtggcgcctcctgtggtcgcatgagggccgaactgcgtgactcgtgagttgagggtaccagtgatcgccgcgatctggcgcgcgtgctggccaactttctgcgcacctcctcctcctgtcgtgctcgctcgaccagctgcgccttaatatgggccatcttaggggtgcgcgccatggtgatagggcctctaggctgacctgccgtcgcacgttgaacgtgacgtgactggatttggccccctcgaattcgtggttgtgaggcaaaagctgaaatgacggtatttaaaacgggataaaccatccctgggaaatatctgccgccagacctaagctagggcttcgcgaaggctgggataggtattataatacatgataactttggttagattcactttatcgggtgcgcttactcgttgattgagcagtatgcggagcccctaattgaaaggcaaaccagagagcacaattgtgctcataagatattgcataagaagatacagatataaataatcgaaggtgcctcaataatgcaaacatatgagccatggacatctccttcgcagccgcagcatctgcccggctactagtacgaagagcgattcgcatatgaaaaaaggcgtaccttgtaagatcggtcgccagcctccatcaatctcgcctccacgtcagtcaacaccaattgaccttaacacgcgctaccggatcatcgctattttgaatcgacgggcggacagcgggcagtgtcgcaattaatcctgtttaagctgtgatgtcagcacttcatcgcatagcccagaatacagctatttgcgtgctcagcgaacagtcagaaccttatattttttgagaaggcatgtttcccgagctgtaccacacttagggagatgtattgttttagtgaacggtggaaatgtgcccaattagggtttcactaatcagctctcgtaaaaaagagatcagacgggaagatctccggacctgactttaaggatgcgcgggaacaacataaattagcctagccagcgctatgcaagtgattgaaaacaaggagagcgatggtagcatccagcgcggcgcctaacaaagctacattagatacacgtgaagttcgcggagattttgtccgcactggccctcttcagcttagccttggaacttcgaacctggaaaaaaagttccaagggccgtatttggcggtgtcttcacacaatacttaaactggaacctcgaactttcagagtatccttccgagcatagagtttagaaggtaaacccctcagttcatgtttggcagtacggcgaacgggctttcttcatgctatcgcttgatcgtcagactctggtgccggcccgaatctgttaccgctaatgcatctagacggaatctttccccgcaagaactttggcgggtcctcctaacatgagtatctcctagcagacacccgcctcacgctcggccaacagcgctccctactcatccgacgtgcggacagagagcctggtgctgttctcgaccacgatggccatctctcgtcttgcgggcacaaagggagcgttctctattgtggtcgctctcttgtgcccttcagtcggtaacggcacggtgtcttcgctgcgtagctgcaagcgcacgagcagcaggttcttctacttgcaacagggcggctggaaacgggggagaatatcctgcctgtgtactcaacatctatttgatctcgcaagttccaagctccaggggcgaaaagaggcccctctaactaggtcactgaagtggggggggtctgcgaacttttgtgcccgttttcgcggttccagggcaaaaaagggcttacataaaggtgatttcccctcgaacctggaacatgtcactattttttccaggttcgaggttccaaggcttagctgaagacccccactggggattatccaggcaagtgttcggccaagttgagtgcttagctgtactcgaaacccgtgcggaaacgatatgtaagcgcactaaagtggttaagtcagtacatctggtccttgggtcgctagcttaaatcctttgacaacatataacctgaggggacttatatatatcaggtgttcgctgagcacgcaaattactgtaataccaaccttacaaaacctgatcgcgagccaaaagtcttactggggttagttgggtagccggtttccaaggggtaaactccgctactcaacaagatttgtcaaccttcaagtccataaaaacaatctggaacgaaggtagggtggagtgataactatcaagggtttatcgtattggagaggtccttacattatcatatggctacatcgccccacatggctacatccatggatccgcgccccttgaggatcccttgaccattgacactcgcactgatcgacagccatggggcagctccagggcaaggcggcgtacctgaaggccacgacccccttcttgaacggttggcatccatctctgcacgctttcgttctcccacgttgtaccatctcacctgcttgttctgccgcacagcctcggagcgggacgtgaacaagctctgggagtgcttcaacgacgtggccgagggctttggcctcaaacaggacgagctggtggagatctgccgctccatgcagcagacgctcgagatccacgcgcgcagcgagatggaccaactcagcgccgcgctcttcacggcgctggacacggacgaggtgcaggacgcagtcgcgaactaatacgcagcaacgcagcgctcgctattgtatttgctgatactttttacgctgttggtgggttacagaacggactggtggacgctctcgagtttttgggcacgatggccatgatgtccgccatgccagtcccacagaagctcacgtgtaggtttgctggggcaagagtggcttgtgcgtgcactgactgacataggtttctgttgcttgcgctgtagtcgtgtacaattgctacgactttaacgagacgggccagttgtcgctggacgagctcacgctggccttcaaatccacgttgacgggactgtgcaagctatgtgtaggcgtggcgtgtccgacggagctcgtactagaagacttggcgcagtacgccttccagaaggcgcaaaagccgggggtggacgagctcttatcgctaccagaattcttgcgctttgcggagacgacgcccgaggtgacctcgtgggttgactacttcgactgccctgctgagtacgtggacgaacaggacggcgatgacagcgacgcagagcgtgaggcagcggcagggcttttggcgccttcagcactggacgatgatgccactgctagaaagagagacgcgagtcttccgcatgacgcaacagctccggacttcacgacggacaaaatgctgacacggtgtccttggcagctcgcagtggttaatgcgacacccagcgcgcctcccacgattgatccgcgactgccagcagctagtcttgagctcgagtgggtctatggctttaacagcgacctgcgcaacatcgtgcactacgtctctcctgccgaggcagcttaccctgcaggcagcgtcgttgttgtctacgataccgtggcacaccgacaacgatttgcatgtcaccactcgggccttgttcaaactctggctgttcaccctacggatcgccgcgtgattgcaacaggtgaagccgctctgctaccgaaaatcgtggtttggtcgacgcagacgctgagcgagagtggagctggtggcggcggcggggtgctcagcgttattcgcggcttccatcgtcgtggtgtgtcccatttggcgtggatgccaaacggtcgagctctcgtcaccatcggccaagatgaattccattgcgtcgctgtttatcagtgggagaaggccgcagctccagttgatggaggagcaagtagcggcgaggccgcagactggagcaaacctgcagagctcattttcgcaggccgtggaggtcgagagcccgtgcacgcgctgactgtgctgaatggaccgtcgggacaatctcaattcgtgacaggcggacggcgtcatttatacttctggactcgtgaacgcgatgcacggtacgcaactccccatgctctcttcgctcgactacctggagtcttaggacgcaaggcaaaagtgcagactatcctgagcctagcagctctaccgggcgatgcccagggcagcggagccattgcaggcactgcgcgcggtcaaatgttgttgttcgaaggccgaaactgtgtacgcgtgctatacgctcatgcggctgcagcgacaactctgtttgccttcagtggtggagttctcagcggtggcaaagacggtaaagtgcgcatttggagtcggaggctggaacctggcgctcaattcgacttggtggcactgggtagctctgctccccgggtccgcagtctcgtagcttctcctgatggcggcgcaaaactgctaatcgctactgcaggtgccgagatttttgagatcgcgtcaagtgacggctccaatctgcactttggtcctgtagtctgcggacactcggcgttccagcttcacgggctcgctgtgcatccactacggcgcgaatgctgctcggtgggggacgatcgcaccgtgcgtgtgtgggacctctctgcccaccgccaactacgcgttgccgcacttgatgctcccgctcgagcctgtgcgtactcacctgatgggtcaagtattgctgtgggccaaggcgttgatgaggaggaagacgagaccccgacagtgacagatccagatttattggcgtggcgtcggcgacagcaacccaagttggtgaatcctaacaaacaaggggccttcgcagtgctgacggagtcttcgcttgccgtgaaattcgaggccaaggactcaaagagaccaattcgaacaatgcgcttctccggagacgggctcactctggctgtggggccgagcgacaactgcatctactcgtaccacaccgaagactgggcgtccaagggtaagtgtcgtgctcgggatgccggagttatcctcaacactttcgacttctcgacgactggcgagtacatcatggccaacgcccagaaccgcggcgagatggtgttttttgaaagctcctcgggcgttgaaatcacacgcgtagccacattgaaggacgtcgagtggctgtcgtgttcgtgtccgtacggatggggtgttcaaggagcttggccgactcgaaagatgcaggcgtacgaaatctcggcggtagatcgctctccaggtgcagagaacccgatgctcgtctcgggtgacacgctcggttccttgcggcttttccggtatccatgcgtgaaccccgaggcgatgtgtcaagttgcacggggtgccgctagtaccatttccaccgtgcgctttaccgctgatggaaactacgttgtggctagtgcacgggacgagcggtgcatttttcaatggcgcgttgagcgtgaagaaatggatgtcgatggaggaatggcaggcaatggggacggtgacgatgtagctgctacgtctgatgatgagcgagagactagtcacggaggagagcgttctccgtttgacgaggctgtgggtatcggcgatttcgcgcttgagctgttggcagaaagactgcaggatccgacgatcaaccaggaagatgaggaagttccgaccgaaggagacccaccaaagtccagctctacaccacccactgcttcagcccctcctccatctaagccgtgggccagtagtagcgttccgccttcggaggctccagatgacggtgacttggagctctcaactgtgcctagtgacagcctcgaactcgagtgggtctacggatatcgctgtcacgatgtccgcaacaaccttttcctgacacgtgccaagggcttaatggtctaccctgcagcaaacgtcgtggtgatactggacagcaagctctggctgcagcgccacttcaaacagcacacggacgaggtcacgagcctagcaattcacttcggccaaagcggtaaaccgagcaacgctgcgctggaggttgcagcatcaggacaaatggggcgtcttccagtcatccatgtttggcgcatcgactcgctcgaagtactggcatctctacgcggattccatcgtcatggtattgccgagctgcggtttaattcggcggggaacctgctggcgagtgttgggctggatgatcgcaattcactggcgctttacgactggcgaagtggcacactgttggcacatgcaagcacgacgtccgtaggccgcattcttggcgtgagttttcagcaggaggctgctactaagagcgctgcaccagcatctgatgactcaatcgcgcccggagaagcaccggtagtccccgtcgtgatcgtgactgtgggcgtcaagtcggcctctttttggcgtctcgcagcaggccagactcttgtcaagaaagacgctctactcggacgcaaaggtcgacaaggaggctcgcctccttctttcctgagcgtcatgtgctgcggcaaggacgccattgcaggtacagtcagcggggatttgtatcgcttcaagggtaccgagctctccagtatcgtaccagctcatacgcgaggagtggcagccttatactgttcctcatcagcctcaggagggattgctagtggcggacaagacggcctcgtcaagctttggagtgctgacttggagtgtctagccgagtttggggagtttaacgcggcgcaccacgcaattcgcagtgttttttgggactcagcacgcgagatgctgctcgttggcacgcgaggcagcagcatccacctcctttcgtcgcttgatggtgcgccggtgggtatgaaaacaccagacggcacccccgtgacatcgttggagacccatgcacgaggtgagctgcatggactgagtgtgtgctactccaagtcgcgaggctgcaccaccggtgacgacggtgtacttcgcatttgggacttggctcatcacatcgtggtgatcaccagcaaactcgacactagtagccgcgcctgtgcgtactccccggatggggatttcgttgctgtgggcttggggagcggaggaactggaaggcgacacaagaaagacggcagcatgctggtgtttgaagaccgtggacagagcgtggagctcgtgtacgagactcgcgatacaaagcagtcggtgacggttctccgcttctctcctgacggtcaatcgctcgtctgcggggcgttggatggctctgtgtatatctacgacgtgcccagcaactacaccaagcgagccgttttctccaagcacaaggccccagtcacgcaccttgacctggcgagcgactcgcaatatgttcgcagtaattgtcgaggctttgagctgtactttgcggatgtcaccaccggctcgcacgtggccagcgccacagcgcttcgcaaccacatctgggacacctgcagcaccatctacaactggtccaaccaaggggtttggccggtggccccaacaggacttggtgacgctgtgaagcgggagatcacttgctgcgcctgctcgttgcccggcgccccttaccaaggaagcaatgccattctcgcagcggggaactctcatggagcaattagcatattcaagtatccgagtttcgttcagggggctggtgcgaagacctactatggacacagcggtgctgtcgctcaattgggcttctcgggagctggtggggcaatttgcctcagtatcggtcgctcggaccgctgcatgcttcagtggcgacggctttatggagctggaggtagtgctgacgtcccatctaatggaaatgctagcatagtgaaggatcctgaggacgacgccgacttggaggctgaaggacgtttcctgcccgaggcgttcgtcaacgatggtggaggcgctcaaagcgaggtgaaaccattcgtaagcgccatgctgcctccatcaggtgacgtgcaggagcccagtgaagcggatggagtcgctggtcaacgatcatttgagctagagcacgttttcggcttgcggtcgcacgatgcccgccagaacgccgtgtacgctcggccgaagcggatcgtttatccgacggggtgtgtcggtgtgagttacgaccgacgtgagcaccgacagcagttctacacgggacatacgcgaccgatattgtgtgctgctgcatccccttgtggagcttttgttgcgtcaggagaaatttgcgcccagaactttgcgcatgagcggccacgcgtccacgtctgggagccggctacttgcacgcgggtggtggagctcagcgcctttcacagtaaagctgtgaccgctctatccttcagctcccccgatgggaaactcctcgctgctgtgggtcaggatgaattccactcgttagctgtgtatcggtcggcatcgggacgctggtttgacggcgcgttgtttgcgagctcccgcacaactcgccacgccgtgttctttgtctgcttcatcgaggacccgcagagtgcagggggctgtcgattggtctcaggaggcgacgaccacgttttattctggaaaattgctccaccagctctcaccgctcgggacggcatctttggtgctcgcgcgcagcgccaacccatgctgtgcggtgcctcgatgggcgacctcgtggtgacaggctgcacttcaggtcatctctacgtctgggaggcttgtgctgtgtcaagggtgattccagcgcacacaggtagcgtctacgccatccatgcgacgccctcagggtgtgccacaggaggacgcgatggtcatgtcaagctctgggctcgcacgacgttgacgcctctggccgacttcgatgtgtctgggctgaaaccagcaccacaggatgctgccgtgcgctcgctgtgctgggatgtggctgaagatcgcttgctgcttgggacaaaaggagccgaactgatcgagttgtctcgcctcactggagactcgatcctcgtgtccgagagtcattatgaccgcagtgttcagctacagggacttgctgttcacccactgcgacccgagctggtagtttcggccggcggagaccacactgtgcgtctgtggcatctagagaagcgctgcgtgatcacgaagacagcgttggatggcgctctgcagagtgtggcgtactccccggacggcaaatggttggccgtgggctttggaggatcctcagcggccagcaaaaacagtcacaaggacggcgcgtttgccgtgctcgatggacagacgctcgagttgctacatgaaggtcgagacagcaagctgagcgcgttggacgtgactttctcgccggatctgacgttgctcgcgctggtgtcggccgatcactgcgtgtacttctactcgacgctcgacgacttctcgctgcgcttcaagttctccaagccgagcggccgagccactcgactcgacttcgctgccgacagcagcatggctcgagtgtcgactgacgccttcgagctgctgttcgtgagcacgatggacggcagccacatcacgtcagccgccagtgccgcggacaccacatgggcaacacacaagtgcctctttgcgtgggctgcccaaggcgtctgggacatcgcggggaagcctgacgaccacgtccacgccctggcgaaggcgaacacacaggagatgctggccgcggccactaaccaaggagagattcgcgtctacaacacgccatgtctttcgagacactcggagcagcacaaactgcatggccacagcctgcacgtggccaacgtggccttcacgtgtgacgactcgcgactcgtttccatcggcggcaatgacaagagtctgttcgtgtggaaaattagcaagaagaggacgtgaggcgcagtacacttcaacatggtaaccaatcaaaatgcgccttacttttcacagtacaagtacgaacatgttcacttaagcgttcgctccctcgaaattttcgctaaaaccaacgaaactacagctagaaagaaacaagataccactcaaagagatacgagaaacatgtaatgccaagggagactgtcggtgtaaggctcactcgaaggttcgcttgtccatcgcttacgactgaatggcgtctgagtttggcggagctccccccaatgatccacttccaagcggcgggaaccccgatccactactcatcggcccccacgaaccactacccggaggtcccatgctgttcgtgttggccactccaccgtttgcagtgatggttgacgcagcgctcacgctcttggcgagagtcatatccacacccaccgaaatccaggcgaagatgccgtcctccacagtgtcaccgagcaacgtgtactccatgatggggtcgaatccagtggccgcagactggttgtagatcatgtcgttgacgttgcgcgtgatgtcttgcgtgttggtagcgtaagcaccggtggcttccacctcccaaatgagagcttggtcgaagaagagctgccccacgtgagcacccaccccacccgaatacgtgttgtttttgagaactgtgccgttgtacgaccctagcacgtggatgtgtgtggtgcgtcccgtgtagtgaccagggaacacagacgtgaaggtcacgacaccatcgacgtccgtcggtgcgagcccgcggaatgccgtgttgttgatgttggaagcgtcagatgtgtcgccgttgccgttagccactacaccagagtacacaccagtggcgttgcagtgccagaagtcaacgaagaggttgtccacaggctcacaagtgttgacatctacgaactgcagctctgcatagagagtgacgccttcttggtcctctctcacatcagtccggatgaactcgccgttgacgtagtaggggccctctgtcacctctggcttgagcacacacttgacgtcactgccgaaaagaacgtttgcgttgacgtcagcgatgtccttgatcaccaaattggattggtgctccgtggtgggtgccagggtgccacctttcgtttgcgaaacttgagcgtagcctccaagacgacgtcgagcttgcaggttctccagcacggctgcacgtcgagcaacgctacgctcctgcagctttcgggcttgtggtgagtccttgcatccttgcagcgtgcgatgactgtcggcctggaataggcgtcgttgcgcgagctccatggccgactgcgcgtgaggctgctggcccgggtgtcatcgcggacactaccacagtagcgaacacgaagaagatcgagagtcgagccatcgcagcgagaatggaggtgctgtgatggctggtcttggtggtggtgaattggaaagtgagctgaagcacggtggcggataattccattgaatatcctcgaaacggggacgatgctgccttgggaagcgtgtgtcgtttaacgttcggttttgagcttcaaaggactgtggcaaggcatttttggttcagattgccagtctggtggtgcagctggcttggtgcggatagctcgagatcagctcgcaagaggatgtcgtcaccaaagttgaagctgcttctgctagtcacccgtgatctcccgcgtaaaagctcatccagctgacttttagtcgctatcacgtggccagcgaagatgccggactttgccgatcggacagagggactgcaacatctcgagtacggagagattcggcaagctgtctcgggcgagaagacttctacagcaccgaagttgatgccaatgcccagaaaacagcagcacactcacacgtcacatattcacaagtcacatatatgtgtacaccacaccacagtcagatttccgcttcaacgctgcaatcgcttcaagcctggaaggaggagaacaagttcgatggggcgcgtcttcgaggagttcgtggagagtacgcgcgtcttccgctgcgccaagtgcaacgcgcacctggcgcgcaacgaggacatcatctccaaggtggccagctcgtgtcttccttcccttctctctgtgtcgctcgctgcctaatcgtcttctctccactccactcgcatctctcatgccagaacttccaaggcaccagcggcaaggcctacctcttcgacacggcgtgagtggctcccaatagaccgctactcttggcttctactacctctcacccttccctgcttcaaactccagtgtcaacgtgtgcacggggccgcccgaagagcgcatgctcatgacggggctgcacgtggtgatggacctctactgcaacacgtgctggagccccgtgggctggaaatacgtacgcaggtgacgccgtgtgctcgttctgctctgctctgactggatgctgtctatgtctgtgtctgtgtctggttgcctacatgcagaaagaagcacacgaggcgtcggagaagtacaaggaaggcaaattcattctcgagttagccaagacggaccagctgccctgaacagtgtggagcttacggcagtcgctctgcgcgggacagcgggcagtagctacagcaacagcagcatggacgacacacaagcagcaagtacagtgcactccacccaccctctctcgcttcctttcctctctcattttgacttgcagccagtctagtgaccgttgatacatgttaccaagtattgtttgttcacccacacatccaccgccttgctttctcgctccgttctttacaggaatccactcgtgtaacgctgctgctccagctcgcgcagaggatagtaatgcgcctgcacttggttcccgccgaagaagcggccgtgcagcgcctgtttggccttgctcgcgccgaatgcttcgtcaaacaaaacaaaaacgcgcacgtggtctgccagctcgtggatttctaccttgttgacgttaccgaacttgccacactcgccacgcacctcatcctccagctcctcgtccacctctccgcggttcacgaggttcatcaagcagagacagcacttatcgtctccatcagcaacgtccttcacgccttcgacatcatcctcagcgaaggttgccgtcttctttggctccggcaccaatccattagccccgtcagtcgtggcacccggaccatcgcgcacaaccttgtcctggctggtggcaaggttgatcagcatagcagcttcgctggccttgcccactttaagcggctggccggccagctcaaacccattcatgtgctgaatagcacttgccgcgcagctttcctccacgaactccatgaagccgtatccgcggtgcttcaatgcagaataaacagtccacacagttagctccctgctgtgcccactttccaacgatgtgtttttgtttttgcctaccactccagactcgagcggcgaaacagcagccatgacagaggagcggatcgctccaaatggggaaaatatactctgcaaacatgtccataagttaacagtagacagagacgtaatcaacaaagacacccatacctccaagtgctggctgttaagctcgacgcggacattagcgatgtagatacacttagtaggcacactaagatcaggggacaacaacacagtgggtaagctcgatggtaagtcagtctagcagccgcagtggcgcttactttttgattgcctcctgtccgatagaaagcgaatcatttgggttcgtgtttccgcgatgcgggcggccaacctgcagcagagacacccgttaacagtctggcacacacacgatcataaccaacgcagactcacccgcatcgctcgattggctaaaggagttccgttaagcacttgcaccgcgctttctgctgccaagacgtcttcgtactccaaaaagcagaaacccttcgaccgcgaagctctgaacacgaacatcaagcgctattgattagcaaaacagtctcggagtggagacaagttccttgctgctcacccaggctctagcgacagatcgatcgagtggatcgctccaaacggtgcgaaggcgctgcggatgtcctcctccttgaggtcgtagtagaggttgccgatgtacaggcggcgcgccagatcgttgggcgacaccttggcgctgggcaagttaagcgacagcaagctggcctgcgccagcgcgcgcgctctcgccgcctgcgcgtccagttgcccgccggcgccctaaaagcaacagcgcaggacgagtatgaaactaaagcacggggccacagcatcaaacaccgaacaccaccgagcgccacagagacaggcagcccacgcaaagaccctctgaactggaaggctagacccagccccgggtctacacgcgcacacatatgcactacttacgatgagagggcgcgtggccgctgccgccagcgcctgcagttcctcgggcgccgtcttctccttcacgacgctggacaagcgcttcacaatgtcgctcagagctgctcgtacgaattagcagcagtaaggcacaagttagcatcgcatttgctcttgaactccggcagaaagtccgcaatttagcgttaaaactcgtcggcactcgatgacgtacgcacctttgggactggcggacgtcttgcgcttggcatcgctggcgtcctcctcgtcgtggccccagcgcgtgcggcgagagcgcttggctctgtcgtcgtgggcctcgtgggcggcgtcctcgtcgtgcgagcgcttggtcgacgacatgctgcgctcttcgtcttgcactctcaaagcggaatggcgtggtgtggggcactcttaactgcagcacatctctctattagaacaaaatagcgactggtgaaacgtgtagccatcttctccttcagctttgccacgaaaaagcatgtattgttcagaattgtcttcttacgctcgccttcccttcctgcaagcattgcccacgctgcaagcccccgaggcctattttcttcaacgcttaccacctgcttggtcgtcttcatcggcgagggcgagaattttatcacctaccttgcctacctactaccgcggcgctagcagcatctaacgcaggcggctgcgaacttgctctgcttcacacacgagcccactgcccacaaaagcacaaaacttacttacccacggatgtcttcacgcgggttcagcagactgcggcgcgacatagaaggagagaacggcgacaagtcatcgtcgtcgtccccgaacgtggcgagattctcggcaccaagattgcctggagcgttgatctcgtccacgtggaatccgccaccattctccaccgccgtaggcgactcgatcgagctcagtcgtgtcaagcgacggttcatctgcatgagagttcggggtgaaaccatgccgtgcgcaagttcgtacagctccgcgttgctcagcgtgccattctgagctgcggccgccgccgcgatatttgcaccaacatcgttgggggcattgcttctccttgaagtgaggtggaagaggttgaaaggctccacctccgcatgcgccccaccatgagcttcgaaacacgagcggcagtgacgaacaggatgcagcaggcctacttccgggatcgacatgcgctgcgaggtacacttagcgcacatccacttgccacatcgcttacatgagtgcggacggcggaatagcttgaacggtgtgttgcacgtcgggtcctgacagtgagtcacggtcttcttgtcgggcttcttgagtttctgcgagagtaccgagtattcgcgacacatctcctggatcttatcggccgcattggacaacaagtccttccacaaatcccgatcttcgagcttcgtcacgctgaaatgcatttccttggccgataagttgttgtcttcgtcacactgctggtggtcgtatgctgtaatgtacaaaccatggtggcccactgacgtgtgggtttcgtcctggccgtgagtataacggctgcggacagccagaggaacaatccacttccacttaatggcgtgcgtctcatcaacttcactcgggtaaaagtaccacaatttgtgcgagtcatactcgtacacaacaagtgcctttttccattcccgaacaccatatcgctccttgaacaggtatccgaacgcacagccttcaccctccaggaacgacgatccgaagccgtgcgccgttgagtagcttggccgactgatttggttgatgatatcttcctggaacgtgggtggagttggcgccgttgtcccaaatggcggtgtcgttgactttgagacgtctgccggagataacgcaggtggcgtaccaaccgtcaagatgcaactgagtgggtccctcttggtcatttcttcagacgcctgcacgagcttccgccacactggattggatttcatatcgcactgaatacgctcctggcttctcgttttcgggtccttgtagcacatcttgagggcttccatgatgagcttcaagttggatagagcatcagttcctgccatgctgtcgtattcctgttcaccattgctgtcaatggtatcgcgattgaggtacaccttgcagagcagaggcgccagctttgcgtctgggccctccgtctgcaggatacgtccaatgatgggacacttgcgagagcgtttgctcttgaaatcaccaatgcaaaacaccagcatcttcgtaatttcgcccaggagcagattccacatcgggtatttttcgtagcacgtgataagggtggtaataacgtgagccccaacgaacattcggtccaaacgcttcgactcgtttgacagaacggagttgagacacttgacaacggaccaaaggtggtatccagacgccctgcgcgtattgaaagtaatcacttgttttaggaagaccatgagctcgtgacccttccgctccatgcacgtgatcaggcattcacgaagacggcggtactcacgcacgttgctacgccagtcatcactgcagaaaatctccaattcattcagatcaccgtcaatcacagcctgcagcaacgtaatccacgcctgcttttcctcttcagaggatgccgcaaagtactcgacagatttcacttccgcagcgtgggaatcatgctcatcccttccatttcggcgctggtggtggatcatggcgttcgcgggagctaccacactatggtgcgaagcagtgctgttgtttgcatcgggaagtttcttcttcacagtcacgctgaagccaaattcgtgccaatccgagctctggacgtcctccatctcatccagcgtaatgacactttgatttccaagattcggcgtaaatcctttgtccaggttggctgattttggttcatcctcacgaactgcagtcattcggagccccatcatgcagttcagactcgcctggcatagctgcacctcgttcttcagcttcttcttcaccaggagattccccttacgcattagatgcgtagagcacaagaagttgagacagtcaatccccacagtcgctgccgaatttccgccagtgttccgagtgtcagtaaactccaccgtctcggttagctcaaaaagatgcatcagcatcgtaatacacgtaggacgcgggtgtccctgggacagcaacatcagcgactcgagtgaagccacgttgcctcgccgctcacgtgtcaatggcgtactccagaacgtcagctccttgatcatctgcacgaagaggtgttccagagctgcctggtgctcctgcatgaacaagtggatgagacgtcgaaccttgcgcgatgtgtacttgcgcaacgcagagttggctgtctcgcgcgaggcgccgcagatagacacgtactcgtcctggcctgtcaccttgtccagcgggatggttctggcggagatggccactccgcgtcctgtcaaatacggagcatgaacgatctcacgcagcaacaggaaggtgttttcaatgcagtcacgctcgaaggcgttgcgtggaggagaaaaggtcacctgtttctgaatcaacttctgcatcatgtgcgtctcgaacagcgacgtgatggccgcctccgagtgctccgcgtagatgaggtgcagcagcagcgtccggatgtcatcatggccaatgttggccagcagcatgtccaccgtagccgggtgctccgccaaaaagtgcaaaatacacgcccccttctgtcctcggatagcgaaatatcgcaggatctgcgatgcaaagttggctgaatcgtggctgaagatgccgtacatggccgtctcgtttacctcagtggtcagcggcgccgggatccccgtatcatcgggctcatccgagtccgagtcctcttcacgctccgtcacgccggaattttcagcgctgtctcgctgcacgacgcccccctccttcaccacctctggatccttcaataattcattctctccattctccggcgtcctgggggacggcagcggcgacacgatagatccaatagcagctgcatcagcgtccgcacccagtgacgaccttgccgaagacttgcgccttctagccagctcctgttcctcctgcgtcagacccccgttctcctcctcgtgctcggcgaagctctgctgcagcgtctgggcgccgtccttctcgaagacctgcacggccacttgaatgagctcctccagctcggcgacggaggcttggcgctccttgcggcgcagcggcgtgtcacacttgagcgagacgccgtcagcctcgcgctgcagcgtgtcgaagatggagtcccagaactccgagcactggtgcggcttccccggctcgcaggccgcgatggcgttgacggcgccgcccacgacgatgaactgcgccgccatggcgcgcgtgtggcgcgggtaggacgcgtccagcgccaggcggatgaactcgagcgtcttgtcgcgcgcgaagaggatgccgcgcaggcggctggtcatgcgcttgaagagcagctccagcatctcgagcgagaagctctcgttcagcagctgcgccagcgtgtacttctcgctcatgagcccgtccacgaacttctcgatgttggcgcgcacctgctccgccgccttcttgcgctcctgctggaacgacgcctcgctgtgcgtgggggacgacggcgccgagccgggcggcgtcggggcgtccttctccagcatcgtcagagcagcccagtgcgggctagcgagagtgaatgtgctgcgcgccggaaacgcgcggaactgacgggatggacgcccaaacgtgtacgtgtaccaccgccggcgccgtgataaatcaaatggcgaggggatttgttattggatgatgagagaacacgaatggttatcgaagacctgttgtagatgatgctatcaatcgatcgtattaaacggggtactctgtactgacggcttgaactgccttttcggggaccggactggtctcaggttcttgatgcacctggtttctgagactttgtgttcttcaaagctctaccctcaaaaaggacccaggctcacctgcgtcttcttcaaagcgcaggcggtattacagtcgcttcgcatggcgattcgccacagtggctgccagcaccgtgtgctggtgttgcacatggctactgccgactcggcagtgccgagtttggtcagcaagagagctccacgggaaattgtgctggcgggaagtcatccccccttcactcttcagtggctcacaattctgctggtttgttcggctaagactggtgcgtaaaagtcaagcgtactttggcactgcatgagctgatgaaatacgatccatgctcccctgagcatagcaatttgcttagctttaagcgactgccgagtttcagtgttggtttatccgcgtccgtcgtcaccacttctaagctcttgtttaggtttgttgcaccggaccaacatcgttgcaatcggcctcagctggagttttgctcttgcaaattgcagcgttcatcaaagctaccctcacctgcgtgccttcttcaaagcacaggtggtcaccacccccgggtggccacttcgcataacaatttaaatatgagcagggctgttgctcctcggaaagctcttggcgcatgacttggtccgtcttatcgctacatgcatcccaattcgctacagtaaccgcaccgtatcagtgagagcagtgcagagctacatttctgctctctgtcggctgtgtgtgagctgcgacttcaacattccctcgcgtaacccgacccgtacccacccaaatcattagcgttttgtatcggtcatacacactccaagtcatgctggacctgcgcaaattattaggcgccgagcgcgacctcgcggcggtgcctgtgctggacgaggcaagcttccgtcggggcgcgtaccgcgacggtagcgtgctcaagttccggggcgtggtgcgcgacgtgcaggacccggagctcgtgctgctgggtggcgagccacccgcgctcgaggacggcgaggccgtgcgtaaccagttggtggagcgcgtacccctgaccgtcactttattcccgcacgcgagtgactgggctacgcgagcgttccagtcattggtcgaaaagacaggcgagagtgatggtcgttgcactaccagtcagagtgatggtaaaaaggcaactaagggcaccaagcgccccgcggacgaggagggagcgctggacgtcgaggccactgagatccagggcgatacccacgccaagaagcccaaggcggccgacctggatcagacgggggcccaggaggacagcctggtgctgccccaggccgtcaacatctacgtctacgacggccagtacaaggacacgccgctggacgccttcaaggtgaacgaggccttcgagttcgtgggcatcttggacctgatggtgcccggcaccgacgccaagaaggacgaggaaggggagagcgtgctgagcgccaagcagctggaggagctgcagatctccgactgcatcgacgaggtgcagcgcaagggccgctcgggcgtcgtgctgcactgctgccacgtgagcgcgctgcagagtgtgcatcacgttcggccgcacgagtccagcgagttctaccagcagatcctcgagagcaacgactcgaggactaagttctgccgggacgagtggacgaagctgggccaggagatgaccgtcgtcgcaatgcgccagcagatcattgattacctggccaaggctgtgcgaggtgacacgctcgcggcggagtacttgttgctcgggctgctgtcccacgtctactcgcgggcggacccttcgacgccgctgggcaatctgtcgctcaacttgtcgctggacaagtcttcaaccgacgagcacaagagtgacttcctgttcagggttcagcagacgttgacgactttgatgcccatggtggcgagggtggatttgtcgttgaaggagctgaattcgaccaagttcatgcctcacaaggattacgagcgcgaagtgctgctgagtggcgtgctgcaggtggccaatggcaccaccatgcttgtgaatgaaactgcgttgaccgcggggcagctgaacgaccagggcgtgaagaacattgctgcgttgcagtcgctgatcgataagatgctgctaccgtacgactttcactactacaacatggatttcccgcaggatgtggccgtcgtcaccgtgtcagagggcaagagcattctgcctgtgacagtggccgtgccgattgttgctgcagatgaatctaccacagcggagctaccggaggagcaggtattagagtgtttccgcgtgttccttagtgtgctgcgctcgattgtggttacgatcggcaacaaggaggctgaaatggccgagaaacattacgtggagtgccgcaagtctcagcaaaaagtggcggtaagttatcaaactgggaagatcgtactcgagtaacgaaattaccgactgaatgatgtgtctgtgttacagttggaagatctgcaccgctggctgcgtctcgctcgcttggtagcgctgagtcgtggagaaggacagatttccaagggctcctggaaggcaatgttgtcgctcgagaaccagcgtctggctcgcattcctgtagacaccaattcaacctaaacttcgagtcatagaagaaggaaaatgggcctcaattttgggtattatgcagtgaaggtacaagttcagtggctcggtgcaggtgtcgacgaagccatcgccaggaatactatccgttcgtcggcgtccatctctggatcacgacaactagaaagtccatctctgcggatggtaacagcacacgaatagaggaaatgttagcatgcatcagcacggtgggagtctagaaacacatagcgaaccgtgtgcgatcagcagctcgagctttttgacgcggatgcgcatgtactgcaggtcgttcttggggttcaggtcgcgaacgacgcctcgcgctttcgtagtgagctccttcatgtagagcgcgtacttttcagcctccgccacctgcatctgcgggtgacgccgaagaacgttgccgttgcggtcggcgatcacgtagccctccacacccttgtggttcttgatgcgctcgagcgtctcctccacctcggacatgtctgtatgtggttgcagaaagatccacggcgtcttttgacgataaactctgcagtgaagaggcggccaaactacaacgaggtgctataatcgaccacgtcacaagtcccgcggccattgccccgagtctggcttgcttcgaggccagaagtcatgaagcagcacaaggtttcaacagaaaatcttcttagagatgctttgaggaagcattgataagaatggatatgataccgagacatgggagaagttagcgatgagataggtggtggtttgcgtcagctactaaatctaatgcgatggcgtgtcaaacacaacgtttaaaatgctttatagcgataatgttagattcctagcaccctcgctccctcttccgttctgagtctaacggctcgattcgcaataaaaagagttcgtgttgtgatcttgggtcagcacctcctcgtcttcgacttcgactttccaagtaggcgactttgagttctgggcgacactacacaatctcctggatcgtgttcgtcctcaccactgccagattcaccgcaagcagctcatccagcccagagatatcaagggtagctttcagcagcttccgacaccatgggtgtcatgcacgacttgatcgttcctggatccggaacagtagcggaggtgctatctacaatccagcagctatgtggagaaatgaaggagtgccaggacccgtgcacgcgcctttaccagagactcaagagcgtgctcgacagtcttgtgagcctcgaaaagaacaagacgcgcctcccgccgcctgaagcacttggcaagtacgtggctgtcaactctacgaccttgagctatctggagcactaccgagggaagaagctggtattccgtttgatgaagcgccaagcgatgatggacgaactccgcgcgatccacgaagagaccgacaaagtcgtccttgcattgggtctcaccaccacagacaaatggaagcaacagttcgaagctgatcaacgcacccaccgagaacgtttggctgcctcggttgataatgcccaggaggtgttggctgagcttcaggacgctcgatcgcaacaagagaccatgctgacgctcaagtacgaggtcgagctacggccagagcagcacgacgaagacatggcgaaactgctgaggacgatgatggcgacggtgatccgaacgtccacgacttccgttccaaagctgccgccgtggttcctaccgccctatgaagttcgcttcaaaccgaacccattcgcccgtggatcattcgcgactgtgcatcgtggcgtgcgtcggccaaatgccaacgtggtcgtcaagtgtttcctcgtcgatggggttgacgtagacgagcgaaccagacaaaacatcgagatggagatgaatctctggcaccagtttgaccacccgaacgtgattaaactgctgggtgcttcacacatcagcacgcctccatttatcgtctgcgaggacgccaccaacggcgatttaagttcatttcttgctcggtcagacgtcaacaagcagcagttgtggaggttgttgtaccaggcagcgcttggcttggaatacatccatacgaaaagtgtggtgcatggagatctgaagctcaacaacgtcctggttggagcggacgggcaggccaaactctcagacttcggcttgagcgctgtgcggacctcggccattctgtcagagactacaggagaaacgccctacactgctggcgccttgcgttggcgagctcccgagtgtctgaggagggcgccgacgtttgcctcggacgtgtactcgttcgcaatgtgcattatcgaggccgtgatcggcgaacctcctttcgcgttcctggacgacgacagcgttcacgagaagctcaggaagggcgaaatccctgacaagcccgagaaaatgtctgcagtggtgtgggagttggttgtggccatgacgaacgtggatcctgccaagcgggctagtctgtcacaggtgctcaaggcgctgaaagagttggcggatggagcaccgagctcgtctccgcaatcgactgcaaaagctgacgagaacaaagcaaccccggctgagaatacgatcgctacgcgtgagaatcatgaaccactgctcgacgctgacattatcgtggacattcttgacaacgtggctggtatggacgataaggggaaggaacagagtttactgcaccttgttcgaatgtgcgtgaaggatgaggagcgcccggtgatgtacgcagccaacgcgacccagatcctgaccaacttggtgaaaagcagtcgcacctactacacgaagctgtacgcgttgcagtgcctgaagtgggctgtcgtggtcgacgcgaagctgtcacagtccgagctcgattcgctgcgagattgtgtttcggatgtcccggcgaaggagctcgcgtcattggcgagcgctcttactaacggcaccgaccaggagaaggaagaagccgcgttacgttgcgcgtgcatcgccgccagaggaaacggaggcctctggcaaggtatgacctggcttcaacctatcgtctctttctggcagagtttgagtgaagctcagaagttgtggatcggaacggtgcagcctttggtctcactgctgcaaagtgggaatgactcgcaaaagttgtgggctgcggaagcgatcggcagcctcgcgacggagaatgaagccatccgagctgagattgtacgagcagatgcgatcaccccactggtggagcttctaagtgctggtaccgatggacagagacaccgagcttcctttgcgctgaaaaatctagcgcttcaagcgggtgtgtgccagtccattgctcaaaagggggtcatcgctccgctgctcagattggcgcgacttggaaccgcgcagcaaaagcaaacaacttcagctctactagggagtctcgttctaccaagctacccgaacaaagccgacgttgagcacgaaagaagcatcaccccgctggttgcgctgattgtaatcggatcggacgagcagaaggagactgcggtggcagtgctatcagatcttgccaaggacgatgccacacagtccgagatttcgcgtacaggaggagtggcacccttggttggcctcctgcgtactggaaccaatgctcaaaaagcgcatgctgcgagtgtaatcatgaatctcgcctgtaatggtactaccagcgccgagatatcccgagagggtggtgtcgccccgctcgttctgctggcatggaagggaaacgagcagcagaagacatccgctgcgggcgcgttgctgaagctgagctttgacgtcgaaattggagctgaagtcgtaaggtgcaaaggtgtcagccctctcgttgagctcgcccgaaccggaaccgatcagcaaaacgtttatgcggctggcgcgttgaggaatctcgccatcagcgacgaagtttgtgcggagatctcacgcgaaggaggtgtcgaggctctcatcagacttctcaagtctggaacggatcgacagaaggtgggggcgataggagcactcctgaatctttattcaagtgctgcagctcgctccgacattgccagtaggggaggtgttaaagcgctccttgagcttttgcggacggggacggatgaacaacagcgcttgattgcgtgtgggctgagccacctggccaagtacgaagacggtcgagcggagattgcgcgtgaaggaggcatcgcacggcttgttgaccttctacgcgctggaagcgagcagcagaagggttacgccgcagacacgattggggaccttgcaatgagcaacgacaagattcgagcggagctcaagcgtggacgaagcgtgccgttgttgaagaagatgagccgaagcgggagtgaagagctgaaggagagtgcagcgcgtgctctgcaacagttgaacggtggttcctgtattatcatgtgagggaccgacaaaatatttgataatggataatatatctgaggtattcatacaaccattgctacgtgatattgctctcctagcttccaataagttgtaccctgacaaggttagccaattcatacatatttcgattcatagtgaactaaggcctgatgcttgacaaggcagcctgtccgtcgcaaaacttagttaaactaccggtttccattgctgaaacacgagatcgcttagccgcctagcgattgtgaaaaatacattagcatcaacatttccacccattgctccacccaaaacttacattgcagcagccgtgtccttagatacgaagatgatgtttcttgttgcagcctctgatgcaaatcgagcgtcctgaagcgtatcgttgacatactggtagcacagagctccctgaaactccatcatcaccgaaccgggtgtgttgttcgccgcatctattgctttctgcaacgatcagaagcacagaaaagtaagtactggcagtagtatttcatacgacgttccctcaaacataccccacagagaacaccgtcatcagggaacagcgtggtggcttgttcagctgtgagtttcatctgtcttgttcgaataagcagcgtaggctcgtcgacagtgtcgctagtatcgtcggccttcttcgtagctactgcgatcgccgtcacgaaatctagcatgacagcttcctttggctgcgtcgcgggagggaggcaatcacagctcgtaagtacccgacaattgatcactcaatttcatgcaaaatctaccactgcgaagcacacaaacacagtcggtgcgtcttccttccgggcacatagcccacttgtgatcggcaccaccagctgcggcaggtccaccgaaagccccaactcctccgccgtccacgagggcattttccacagcgacctcgcgccattgttctccttctccggcatcatctcggccaatggagactcgtgagggtgcatcggtagcggcgtccagccgccatgatccggcgtgaagtcgaaaatctacaacatttcaatgcccccaccgtcagcactgcatcaactttaggtcaaaagaatcgcgctcaacagacctcactccacttgttgttccatgccgagaactttgcttgacggaactgctgctgcagtgagaagtaggtcagcgggaaacacgcaaaccgcaggcgactggaagtctcaataatgggctctgcaatgaacaagtttcgatatagttagccaccatagtcaagaaaatggtgtcaagccgttaccccacccgtggcgctgtagagatagacgtccaagtcctcgcaatcgcgcgtgcggaactgctgcgcggcacagacgacggtgcatttcttgcagtcgcgcaggaagacgctgctctcgcagggccccacgacgatgcggcagttgacgcaggcatcgatctgcaccgacgtgcagtggtccagcaggaagatgtcgcagttgtggcagtcctcgatgaggaactgctggccgttgatgcttcccgggagcttggccaggaacgacgccgtctggatgttggagaagatgaagtcctcgcgcttgagcgtcgggtccctgccaaagctcggtgttgacttggtgctgccggtcggggacggaggagccttggtcttggtggattttgccttgctccgggcctcggcgcccagtgcgggtggaccggcgtggcagatgttgcccatgacaacttgaatagcttcaaggtgagctcgaaagtgtgtggtgggtttcacgcgatcacgactcgcagaacggacgggcgagcctaaatgaggagcgccgacaataaacttccgccagattagatcttgtcatccaacgtggcgttgagaatcttcttctcagcgttggttgtctgaagtttttaattctgagaatagcaagattcgtctacgaatttgtcgtctttttgctttaactgctctcgattgcaattacacgatgcagcacaattaaccggatcaccaagaaaatatcgcatcgtttttggggttcacgcgtagaatgttccctgtagtgtgtatagtttcagctgcgtttgatatgacatttcgatctgactcgcctgtaaaactctttccaaagcaaccctctactttcgtcgtactgagccaggtgaacacgcccacacgcagccatccgcttttttgttcttccattcctgttcgcaggagcttaagtagctacgatattccaacttagctcgcaacctcggaacgggctgcagcaggggcgctcgtatcgtccccaccttctgtccatccgttccagacttgaatagtctaatgagagccttcacacccccttcgcgtgagatctgcgcgcaaataggtcgcctgtggcacgtttcctcaatgcacacgccgcatcgactttgctgcttgatagtattctagaactacgtggagtgcaaataggtggttagcgaacactcgagcaaacagcaactacgtaatgggtatatatttctcacctaagccgaagtcgatctagctatcggggtaggccatacaaagctgtcttcaacgctcatatcgtatatggcgctgcacaatttctgcgtagaggtcacatgagagcgcagcagtcagcattcaactggcgcgaagcacgcgctgcgacctgctgctgtagctcggttccgtcccgtcgaatcgtctcaaacaattcaacgcccccctcacgaacgatagtagcgcgattctcaccagtgctgaacgccagatcctccaccacgcgcacgacgatatccttttcttcgctgaatccattcctaagaagtgcaatgaggtctctcacacctttcgtacgagcactctcaaacgtgagagcaggaggctctgcagcagcactcgtaggtagctccatctgggtcttctttgcttcatcaatctcaattttgtccgtcgaaacaacaggaacttgtgcccgtcgatcttgtgctacaatattctcttaaatcgtcgcggtgctcttcttggtactcagtttgttccttttgaaacacagcaactggtgcagcgggtgagacctcagattcccccctcactgaagattctagctgaatactggcccttatcttcatcaagctgagctcgacaggtcgggatcatggcggaaacgtcaattgcaacgtcaccactagcagcaacggcttcttctccattttgagcacatcttcatccgatagtaacctccgcaaaaatgcgtctcccccctcatacgcgatttcagatcgcaattcatcgttgagcccatgcgtttgtttgataggctgtgtgacgtacgcgaacaacattgagagtacctcagaaactaatgccctttgatcctttgttccagctcgcagcagtgataccaccccttcgaaagctttgtcggtaccttcatagaagtactactgtcacgatattatcgactacaaacacctccgaaaatgggtaacgatctgccaactttgtgaagatcaagctgcagtaagctgtgtgacccgcgtgcaacgcagtcatctggatgaagttaaagatgtaggaagcgatgtgctagaagttagatgttgaagttacaggcaccaaggactagaattgcttaggaggaattggacgaaggcgctaaactcaatctcagttttcgattttccagcgtactcaacacagcatctcggctcccgatgcccgccgcacttcctctctaagtgctaccatatcacttatcactctttttaaaaattgtgacaactactagtaaaagtctgcctacagcaatagcagcgtaacttttgtgtgtgtccgtcccacgttgtagcaataattccagcgactcggtgagctgccatttgctcatatggttccaaactccagcaatcgtgagcctctcttgccagcttaacggacatgcggtgcttcgggtagcagatcgggaggtccgctgcagttccacgtgcgaggtttatcaatatctcccatacttctccttctgttcatcgcttccatctttgagcagcagagtaaatggagcgttattgagggccttcttggctacaggatacaggtattcgtactctcgcagaattgcacctcggacttcatcataactgcttgctaggatcttcaacacatcagcagcataacatatttgacgataggatccgttttgtagcagcttcgtgagtgcaaaaatgatactttgagttatgattgcactccgaacgaaattgctgctgctagcgaggatcgcaagctcaaccaaaacctcctccttttcactctcccactttgaagaacgaatgttagctgatgaatacctttgttctcgacaaatgatttccgatcgatgtcgttccttttcgcaagatccaatttgaccttaagactgtgtccttccgttttccgatgtgccacttaaacgggcaaaagcgttagcgattgaggagttaacaggaaatttcgtaagtatctggtatttccatttgaaaaaagacctggatagctgaaatacctgccggatgaccataccacggactgcgtcatcgctcagcgcaacatttcccaggactataccagcaagcatcttatctccaatggttccagtcctcatcaggttcacaagcagctcaattcctccttcctggccaagcgcagcaccaatatcctcgctgaaggacagctttgccataactcttgctgcacagcgcttttgattgcttgatcccattcgcaaaagtgctactaaagtagtgacacagttagtttggacgattgaggctcgaatcatatcggtgcctctggcgagatccgccaacagaaccaatgcgctccccttctgcagatcattcccgtgttgaagaagtccagcaattgattgaacagcatattcgttggcgaaagtagcgcggaccacgtcggagatgttcgcaaggaatgttagcgcctccgcagcgcaaaagctacgattactccagtgccattgcgcgattttaactgcacatatgtttgccaatcaaagttcaccatttttgtaagggcaacagcagggggttctttgctgtcatcaggcccatcttgaagaagcgaaagcaacggttcagcgcctccactactgacaaactcgtagcagtagccacaataagtggtgatcttcgcgattgcattcacagcgcagtcttttagcgattcgtctcgtaaaagctgggcaaatgttatagcccctccgttgccaaaagtccccacatttccgagagcatatacggctgattctttttgcgcatccgtccgcgataacagctcaacaacgccttttcaacttcaaaactgcaaattgtaagttcaaaacagcaaaaggtaacattaaaacaacaatactctataaatgtatattacaaactgaatgatatctatcatcgtatacgattatagagtacaatttgcctattggctagctgtgctgcgtgccaaccaatgagctgtgtataaaagtacgaagctagcctggtctctgctcgtgcagttttgaacttaccttttgctgttttgaacttacaatttgcagttttgaagttgaaaaggtgtagactctcgataaaatccgttcttaagcttctcgtgagactataaatctcagcaggtaactctggatgtaagaccaaattcccaattacataggcggcacactcctttagaaccgcattctccgttataactcgtttttgcctgctgctagctgtcagcacttggaaaagcgtcttgagcccgcctccttttgtgatcttgactcgaatctcattgttataggctccacttctcaattcacgtgctgcaaatatctttacgtcttcattcgacccttccagcagaggaaccagcgacacaattccaccaacccgaagcaattcttcacgaaaggttttaccaaaggcaaaacgttgaatcagtccatgcacaacattctgcctatcttcaactgcggccggaaatctgtgctcggaatttaacaaaagatcaactaaaggattggcgcctccttctcgatcaatcgctgtgtgaatttccacttcggcccgcgtagaaagtgtggcgagggcgctcgcagcgtaaaatgttcatcttttccagaacgtagaagtgtgacgagaatcccgacaaactcatcagccgaaaattcaattgctcttccgttccagtctgttgcaagtaggaaaaccttgcaagcattactcagcggtgatacgttaccagtgatatgtgtcattgcgagtgctcattctgtccagtggtaggacaggcaacaagtgtagctaggttagagatctagcctcacgtctccaaggggaatgcccctatccatgtccgtacggagcccctgctccaagtgtgttctcattctcaaatataccttcctcgaaggactcgagtctccggtgctgtcgactcttctcggtggtcttccttttctaacctcctttacagtctacgataggttgataagaagggctatcccacctagacgttccgtcttatgcatcattgtaagtgtggttcattagcacagctgctgctcgagacttttgtgcatcggttccagctattgcaagtgctacgagcagatcacgattgtcatccaaaagcgtaagacgtttgattaccccccgaagagttttgagtatccgctccgttgggaagaagagtaataatgggttaatagtttgataccccctgtgcgtacatgtcagtgcaaaccccaactgtcggcctaatttcttggtatcggtagaggcgcacagaagcacaagtagtagacgccacctggacttcgttttggtcgtggcaatgttcattattgcaccaatgtgatgacatacttttgctagtttgctaaaagggagaccaacgcagcgacacctccttccttcgcaatttcacttgcaagatcaccgacgctgaccaagttggatatcgcatgggcggcggacctgcctgttccactaattgacctcaagggtttgctgacgaaattggctctcgttggtgaaatttgtgctcgaatagctcgtgaaggcggaactcctgcgattataggggtctaaacagatagagcaaagggcggggcggttggctgactgcaccgtatcgcctgtagtgatgctgctcatctcgagtttgaaggtcaaagagaattgctccactcatccagcatggttactggagcgaccagcaaaaaaatagcagcattttgcgggtgcgctggccaatttgtcgaaccattccgcacttcgacctgtcattgatcaagagggaggcgtcccagtacttgttgcgcttttcatgagtgcaacaagacttttaaaaggtggtcgatgtcctcgtgaaggctacgcagctcgttcatcacggattggagcgggcaaccaccttctgacctacagtccatttctgcaaaaactaggaagaatacaaagatttaccaacgtcagtgtatgatttgttatcgcatgcttcgatgtatccggcgttctgcaacctcacatcagtgtacatgtacagcccgttggacgcgccccgtgctgttgcttgtgctccacgagtgtgttctgatatgcgtcacctcccttacgcgcgagtgcattacggagtggactaccagcccttaaattcatcagcgccgacaatgtttggtacttttgagcctccgacccaatgcgcagaagcgtcaacaaaggatcggcgcctccttcacgcacaacgtcgccaccaataccatcgttgctggaaagcatcaccagcgccttcgcagcgttctgcttaagctcatcagaaccgaaccgaagaatctcaattagtggtgggatgcctccctcgtgagaaatcgccgttcttccctcgtcggagctagcaaggttcaacagaataccaatagcaggacagtgtagttccgtacttccagaacgcaatatcgcaacaagcggtgtcaccaccccgccttgtagaatgtcaacgcaaactatacgactgtcactcaagttctgaagcgcttgcaaagtgcattccttctggagatccgttccggacgtaagaagcgcgacaagcggtccgactgcaccttgtcggacaatctcagcccggattgaatctttgttggcgaggtttctgatagccgccgcagcaatttgtttgtgcacttcagtcccacttcgcacgagcttgacgagggacacaatcacacgttcgcgtacgatttcatcgcaaatagcttccgtgacggcaagattcgcaacagtaaacgcagcatagttcctttgttcgtcgtccccagtttcgaggatgcctacaaggattggaacgccgcccttctgcacaatctcgatagcaacgatactgttgcaggcaagctgaccgagcgcatccaaagccccagctttaggaccatcggttccggcccgcacaaggtcaagaagtaccgcaacacctccctcccgtgcaactgcaaacggaactgattcgctggcagcaagagctccaatggctccggcagcgagcattatttgctcatcaagtccgtctcgtagcagcttgacaagagcagcagctcctccctggcgatcgatctcaactcgaaccacatctccactcgaagcaaggaacattaacgcacccgttgctgcagtcttttgcccgtccgtgtcattttgcagtagccaaactagagactcaatccctccaatgcgtagaatcaccttactgttctcgtccagccggccaaggaagcctattgcacgtgcagcgtgcatttgttgacaatctgttccattgcgaagcaatgcagcgagtggtataatgcctccggcacgagcgatctcactacagatcgcttcgtttattgacagatttgcgagagccccagccgcattatccttgacctcgtcggagtcagtgctcagaagctcaagcaatagcgcgatgcctccttcgctcactacctgaactcgattttcgtcgttcgtggtaatattcactactgctccacaagggcacacttctgctcttccgtaccagttcgcaacagtgagatcaatggaccaacacctccggccgccacaatttcagctgcaatatcatccgccaaggacatgttggctaacgctcgacctgcaaaatgtttttgcccatcggttccacttctcagcagtccaatgagtgagatgatgcctccatctcgggctattgttgcaaggtatccgggattcgtcgtaaaatttgataatgcggcagcagcaaattgcttttgtgtgccagttcccttttgagtgagcgctacgagttgtgcaatccctccttggcgttcgatttcaatgtgggcagctatgttgcgggtgaggttctgcacgacgcatgctgccatgtccttgaaatggtctggtttcgcctgtaacaagccgtcgaccacagtgctatcagacgatgcgctttcagcactgaggccgaagtctgccagctttgcctggccatcagcaccaacgagaatgttgttgagcttgaggtctccgtgcaccaccttcagtttgtgaaggtactccagccccagcgccgcctggtacagcagtcgccacatgtgctgcttgttgtccccaatcgtcaggaacgagcgcagatctccgttggtcgcgtcctcacacgcaatgaacgggggcgagctcacgtgcgaggcgccaaacattcgaatgacgttctggttgttgaagcggtgccacagcgctatctccgcctcaatctgcttcttggcctcttcacccgccgccattccatccacgaggaagcacttcacgaccaccttctggtcaaaccccagcacaccgcgatgcaaagtagcatacgaaccgcgcgcgaacggcgtcgggtcgaatcggacctcgtgacgcggcaggaaccagggcggcagcttctccgatcccccgtcggtcgtccgcttcaccgtctgcgtgaacgccgtcaagagctggagtatcatctcgttctgcttgtccgagtgctgcttcatctcgaactgggccgtcatcatggcttcgcgttgcgtgcgagcgtctgccagttcctgcagaatcgcgttgtcattctggaccagcagcgccagcgtctcctgctgcgcgcgttggtccgcctcccactgctgcttccagtccatcatcgagtccatcgcagcgaggtccagcacgttgaagaggcggtcgatgtcctcgtggagctgccgcagctctttgatcaaactactgcaagaccaaggtgctgacctgaatcaccactacacggttgctgcagggaacagcaaagaggtaatgaggcctgatcattctggacatcatccattgcctgaatagtacatgcagactgaccaaatatcttccgtactgtttcagaccaagacggtgctgtttgagacgtcgatgaacacgacgtacgagctgatgctcaaaagtggtgcggacgttcacgctcggaactcgtgggatgatacgccgctgcacttccattcgaacaactggaactcgcgccttgtccgcactttagtttccggtggcgcggatgcgaacgccgtcaacaaggtaaggagaggatcaagttttaccgctcttgacctctacacatcgtactaatacttgtgcttgctgtaggaaaatctttctcctcaggatagcgcgatcttccgcaagtcgagtcaaaggagatcggacgatgacgagttcatggaaggctgtcgcattctgctcaagaacaaggcccttgtggcctggtcagacccaggcgagtatttccgatcgaggtttgaaccggacatggatgcgaacgctgtaaaggcccgtttacaacttgtgttcgagtgggagggtcaggcgatatgtctttcaagctccccattgaagtcttccatcgtggagcgttcgatatcgctacgtatttctcggccttgaaccgaggccagggtttgtctcgaaaggctgaagctgccatacaagcggttgaagctggtgatgtgggtgagctggcagatctcctgtttgatggtgtagacgcgaacgctaactttcccagcggaagccacggagtaagtactgatgcattgtgcattttttctaatggattttgccttcactaacaataatgtccaccagcaaaagactagtctgttgtataatgcagtggacaaaggcgctgttgatagggtgactctcttgctcgacagcggggctgttgcagacggatcggatgaagttgaggtcagtttgtgtcgaatgattggctgtattacctctatgtttatgattttttttctttcaatgttgtggcaggttcgtccacctcttctcgcagctgtgaaacgcgataacctagagctcgtagagctgcttcgctctcgcggtgccaatatcaacaagccgtacacactcatccttggtgacgacagtgaagtggtgagtgcttcaaacctgccctactggaatgttgaactaatctcttgtactatatcgtggattcgacatacagacgcaaaccattctgttcgagctgccctctgtggaagtattcaacttcctgctcgaagagagagcgaacgttcatgccaaggactcatttgagagaaccccactccatgaacatgctgccaactggaaggaggatgctgatcgaaaacggggccgatgttaacgctgtggatgaggtacgcagctcaattgtcacttgcatagctcgtataaatatttacgtgagccctgttgttctcgtacagaacaatggcacgccgttggacgccgccatttcctctctttggatttggagcgaggatttcattcgagttgcttatctcctgctaacaaaccacgccgaagtgccatgggatgatccaaaagaatattttccgtcgagaaataagcccgagtgttattcagcgaggatgatgccacgcatacaactcgtgcacgaatgggcccaacagcgcgacttcggagcgaaagaactgacttcaatgccagtcgaaatctttgagcaaggaccgcaagcaattgccgagttcttcaagaaggcgaaccaatcactaggggtcacgccggtgcgccactccggtcagtacaagctagcaccccgagtgaagattgatcctgctcgaggtcgaatggttgccagaagtgggagttttgtgaaagcttcagagatcgggcatcgatctcagcaaacttccaaaggaggatccgagtcccagagcatcctctaccggtccaaggtcggcgttgtcggtcctagtctatggggcaagacaagcttcatcaaaagcttcacgaccggttcgtccacactggaagctaaggacgttcgcactattggaattgaccagtttccctggagcttcaaagtccaaacaaacactggcgactgcgaataccaagtttcgttttgggactttgctggacaggaggaataccgagcgtcatacacgctcttctactcgtctcggactctttatttgctgttcatcaacctcgatctgtacagtaagacgctagaagcagcaacaatggactcggctgatgatcctttggacaataccgtcatggacaccttcatggagctccacattctcaagtgggtacgaatgatctgtgctcaccacccacaggccgagtttgcgttcttgagcacgaaagccgacctgactccagaacgacccaagggaacttcgcgatattcaacaagacgtcgtgttgaggtttaagctcaacattaagcggatgaaggaccgagtggaacgtgctctgatggacgcacaaaacaaccggctggagattcaagaggcggatcctagagcggaaacgaaagagctcgacgagaaaatcgcaggttgcgagtaaattttacgcaagcaaccggttctgctgtcatccgaattcatcgttttctcgagtgctgacatgaagtatgaaacaacggctatcggtaaaatgaaagttctgatgctcttgagcgccagagcagtgaagttacccgccagctacgcagaactactgaagtacacgcaacaaaagtgggtttcaggccaaaagaaccagacgcagattcaggaacaagttgacatggccttcctacccgtcaagactttcgtcgagtcggtgctccagtcttcacagctcaaaatcccaaaagatgaggttctcggtgcgttgcatcttctccacgatacaggagatattttatggttcgacggagtgtcggatgcccaactactgcaagagcgtctcttcttggatccgatgctcgtgatcgacttcatccggcagatcgtcaaccacaagatcgctgccaatgcctccctggacggtgctgtccggcattccgtgctccagtccctcccttactggaaagacgtcagtacgtccaccactcaccagttgaagctgctgctgcttcacctccatctcgcttaccctgcaggacaagcaagcaagatctcgtggaattccgatctggttgtgcctgtgtattggaagctggcccccggtactaccgaatccaaggattttccaacgaaggaggaacaatccgcgggattaactgagcgggtgcgttgggagtactcgtttgagcctgcaattcacgaaaatctgtttgaaaagctggcagtggtgacgtattcaccgtcactttggttcgaacgcagctacactcggtctagctttatcgacagggtggctaacaaatgcagcgccctcgtcgacagagacgccggttcagaaggcaggccttgtgctctaagcattaccgtggtagcgagagagcgaacactggcgtggaaacagttcgtgtggtactgcatgaacatggaaaatctgctccggacttaccccggattgttggtgacacgctccaccgtgaaccctcgtggccgatactacgacgttgaccagctcctcagtgatcaagatcatgtcaagcagctaattgtcggcaccaaccaagaaatcctcccgtttgacatgcgatggtacaccgacaaatcctgcgagcttcagcccgtgacgttcactgatatcgagaaggccgatctcgctacgcagccaaaggttactgtagtacaaggcgacatttctgaccgagctattgagcgcatctgcgagcggttcgaagcttcagctgacagagtattgcgcgcacagatcgcactgatcacagggatgaacaccaaagccaaggttccgtcgttgtggacacttgagtaccagggtttcgatgatgaagacactggcgtcctagctgccgcagcgaagaaagtgactacgactgtcgtagtgaagttccgcagtgacctcacgggcaaatgccaccacgacggcatttccatctcggtcgcgaaagaagtgtttgccggacgctttggggaatgcctgaaggtacggttgatgtaagttgcaatagcgataggttgcagcctttcttacgcatgtatgactgttctaggtgggtttgacattgctctcagccgctgttcctgatttctttgggatgaacgtcgtggacgctatcaccgaaggtgagtttcatgcaaaaaaggtaaagtttgtgatgatgtagctataacggctgacgttgcgtgttgccttatcatttcatcatgaagagtgcagagagcagctcgacaaagctatatatttccacggggcttcgaagcgaagcggggtcgctaagcatctggcagcggggcctcagcacgtggacgaaaaccgagagttcagtccctacgaaatcttggatctacttcgtcgccttctgcagatttacgataagaacttccagaccaaagatattccacatctgtcgggtctggtatgcggtgtcatggtgaacccaacgcggtacatctgggcgtccctggatgagattcgtgtgtatggggataaaattatgctcgcgaatgactacacgacgccagttgatactgcggcgctcgaacgaacgcaattgccagctcgggccaggacggatatccaacatgattacaaccagccaaagatgattgacgcggaaagcgacaagataccggttcaaccgaagacggatgatgtacctggtcatttgaagacggacgagacaaagattgatgaaatttctgctgtaagtgaggtcgcgggtttcccgatttctgtcgataagacggacgtcgcaacccctgaagtgttgactccagccgaggctccatctccggttaaaaccctcccacctattgctccagcttcacccgaacgcagctcggctacgacctcagaaagcaaaaagggggtgctgtcagtgatgaagcgccgactgtcaacgataaaacctgcaactggatccgtggtggagcgatacaatctcaagcttatcggagcaaagggtcttgctaccaagtccaacaacccgtattgcatccgccgctttgatgcacccggcgggaagccactacacgaggttcaaaccattttttttttaataacgttgaggtgtattgagttactggccttgtggccgaacaaggttcaaaccaaccctcatcgagatggtgggaaggatccgtcctggatctgcactttgcttctgctctttggtcccagattccactaacacaacaagcagggcgatgcctcctccacgcacgatctgaactcgagctacgtccttcactgccaggtctcgaagcttgcacgctgcataattcttctcttcatcgctcccagctcgtagtagggcgacgaatagagacacgtctccatcccgttcaatatcagctcgaagtgcgtcgttagtgttggcgatggtcatcaacgcacacgctgcgctatccctttgttcgattgaccctaccagcactaaagcaatcagtgggtcggttgactgctcgcgagcaatatcagtggggctccagtacgtgatccggacgagattatctaacgccactcggcggtggtcttctgctggcgggtaccagtgtgcacaaggccaaccagagggccgatgacgcccctccttacaatcagctcattagcgtccttgctcagagccaggtttcccaacgcatacgctgctcgatgcttctgatcttcggttccgactaggacaagcgccacaagtgatggaattgcttctccctgcataatctgagctcgaatcgcgtcgcttccagtagtgaggttgcccaacgcttcggcagcccacaatttctgctcgtcatttcctctaagcagtgtgaccagaggctgcaccactccaacttcgaagagactatcggtgtcacctctggtagcgatacacccacacagagcaaccgctttctctttttcttggtcgcttccagttttcaagtcagctaccaccaacgccagctcgctcttagaagcttcgcggacgctcttgcgaatttcttcgaattcaggagtagtcagcatggagtctgcgaccatagaccacttcagacactgcaacacgtacaattgagcgaaatacgacagatcgcctttcagcagagtgataagtctctgtactccgttgattttgtacatgagtgcacgctgctcgtcattgattgaagctcgaaggaggcatcgtaaggccacctcagtttcccgtccagcagaaacttcagccacgagatccaagacgcccattgtatcgaaagtagattcctcgtcccttcgtggagactccaaagcaccaacttcttcgtgttgtggcttcatcctttcttcgtcttcagcaaggttattgagcttttcaagtacataggagagagtagcccgcttgcttgggtccatgttcgtcatggccataactagctcccacccttcagtcagcatgtcatctggtttagctgggattacgcagttcttaaccatctcaagaacgctgttgtcgtccacaaatccaaatgggggctcaccgctcacggcctcgataatgcacatcgcgaacgagtacacatccgaagcaaacgtcggtgcttgtgttaggcactctggggcacgccatcgtaagcccccaccaacaaacattccgagagttgcgttgctggaatcgccgggcgtccgcacgacactcaaaccgaagtctgacaatttcgcttgtccgtcagcactcaccaggatgttgtttagcttaaggtcgccgtgcaccacctgcttattgtgaatgtattccaacccgagggctgcttggtacaacagaccctaagtccgttgtttgttgctttcagaccgagcgaggaacgaagcaaggtctccactggtagcatcctcgcacacagtaaacggcggtaagctgacgtgagaggctccaaacatcttgatgacgttggggtggttcaactcgaaccaaagtctcatctcgctctcgatctgtttactgtgttcatctttcactgcatcaccaactagaaagcgtttgaccacaacgttgcgaagtttccacgtaccctggtgaactgaagcgaaggctcccatcgcaaacggctcacgttcgaattcaatctcgtcggatggtatgaaccacgggggcaattcatcactcattaccaccttcgatcgctgcgcaacgcttgacatcatagaatgcatgagcttcattgccgcgtcgttcagtcggcctttttgcttcgtcgttttaagtttaagcatcatcatgtcttccctttccgagcaagcgctctgtagttcgcccataacttcagcgctggtggtaaacagggagctcatccgctcaacctggccagcttccagctgcttccacgaggtattcacggcgtcactcagggtctcaaagatcgcatcaatctccttactaatctcgcccaattccctagcagggaagctaatgaggcgagtaacgaggtatttcttgcttgtataacgctcgagacaacgcaatgtcttggccaggacgatcatgtacattttgagcacgtcggaacaatttatctccttcgccctcgtcagtgcgtcaaatataaactgtatctcctcgtgaacaatttggaaggaatctcgggcgtagccttctttcacctcgaggcacaggtttgctatcgagtcgagcacttgcacgacgggtcccaagtcctgcccttcaaatcggtggaaatatccttagacgtcgaaataaattcctgtgctgtttgtgtcgcactgctgtcagcgaacgcacatcttgaagcttggggcggtcttccgggtttgctttcgccatggattcgatcagttcccacaccccagctgacatatcacttggtttttcaggtatcaccccttgtttgagattctccagaaccgactcatcatccaagtcagcaaatggaggctgcccagttacagcctcgatgcaacacatagcaagcgcgtacacatcagaggcgaaaaccaattttccgaggctctcgggggctcgccaacgtaaccgaccagctatgagtcctggcgttgatacggtgcgaattgcactgagcccgaagtccgatagtttggcttggccgcctgtcccaattagaatattcgtgagcttgaggtctccgtgaaccacgccattcttgtggagatagtccaatccaagagtggcctcgtacaacaatcgccacatttgctgcttgttggcctccgaccgagcaagaaatgaagccatattaccgtctgtggcattttcacacacgataaacggtggtgcgctggcgtgtgaaccgccaaacagctcgcaggcgttcggatgattgcagcagtaccacctagtgatctcaacaacgaccttttgtcgcactcgctcgtccgctgtaatgtcctcaacatggaaacgtttaagcacgacacttgtgctatagccccacgttccgtagtgagctgacgcgaaagaaccttgagcaaatggtgttggctcgacttggatttcctccggcggtagataccagggaggtaagttctccacggtcatattggacgcttggacaattgtccccatcatggacctgatcaactccagcgcttccttgctatggcgtcctacttgtgaggcttcgaactgaagagtgagtatggcttccagctgggaccgtgtttgctgcagctccagcttaaccgcgaaaaagtcttgggccatcgtcttcagcagcttgtgctgagtgcgctggtcaccttcggactgcagcttccagtctatgtttttggcaagattcagctcctccaagaccaaatcaatgtcgtcgtggatctcacgtagctcgttctgcatctgttggtgtttaatgatacgaaaagccaacttcttgcctcgatagcgcttcaggtagtctgagaacgtggcaacgacaccggtacccgcgatggtgctgtggtggcgcagtggccacctcctcacaataattgcgagtcacaatagcttttatggccattgtcttgagtaggttcacaccctctgaatagagtcgaggtccggtcgttgaatgcagtacagcgcacgggggctatctacggtgagagcgctgctcgttgcgagacttcgcgacccagggattcctttcgcctttcatgcagcccgctgcccctcagctctatcaatccagcgctagcaaaggcacagtcagactgtacccgtcaccagcacttccgcttttctggcttacaatgcgagcacaccctgcgccttgcaagaccgatgcttgtcaactggttgaagtgctctgctattaatactacttcaccaatgtatccatctgtccgcccggattctgcactaggttttcgtatgggcaaggtttcaaaattcaaacccggctctgaagtaacgctagccggccgccccgcgcaaaaagcctccattcgccttcccagtgcgcactcgccccacccgccgcccttagccctcgtccgccccatggagcgctctcgcagcagcagcagcagcggcgtcgccccgcgcacgcgcaagcgcggggctctgcaggacatcagcaacaacgccaagaagctctcgcagccgcgcgcgcggcgtggaggggccgccgccgtcaagaaggaggcggcggccgtggacgcgtccaagccgcgcgcgtcgctgcggcgcaagaccacggccacgaccgtcaactcggcgctcaagagctccatggcctccacggccgccagcaaggccaagaagcgcgcggccgtgagcaagaagggggcggaggccacgcgcgccaagaagcggcggctcgagggcgcggagaaccagcccccgccgccgcaccacaagatccagaccagcatgctgtcgttccaggcggccgtcaagcccaaggagaagctcaaggcagaggccaacaaggagaacgtggtggcggcgctggacaatcaggagcagcccgagatagcggaggtgaagaaggaggaggtgaagcagcaggaggacaaccaggcggagactaagcaggagagtcagaaggaggagacgccagagatacaggagcccgagcagagtgtggccttgcagcaggcgtcgacggccgccctcccgcccccacgcgacgagtttgctcctcgtccgtacactttcacattcgaccacaggaactcgtgcttcgataaggtgacgtacacggccgaggtgcgcgacattgacgcaccgtcccccacgacgaactcccaccacgcgaagctcgtgcgcgagctggacacttattacaggaaacacgagaccaagtacctgccggaagcagactacattggcacagtgcagctggacatcaacgagaagatgcgcaccatcctggtggactggctcgttgaggtcggcgaggagtacgagctcgactcgctgacgtttcacaaggcggtacgcacctggctcctctatcatctccagacacagggttcgattttcttactatttgttgtgcggtcttgtatttttccaggtcaaccttgtggaccgctgcctcaggataatcaaaatcacccggaaacagttccagcttcttggatgcgcgtgcatgatgattgctgccaagttcgaggaggtgtacggcccgaacgtggaggagtttgtttacatctctgaccagacgtacacggcggaggaggtacgtctggccttgactattcaacttgctacttgcaattttgtctaattgctctgctgattctgtagatgctggacatggaggccaaggtgctcaatgcgctagaataccgcgtggcttcgactacttgctacggatttatgcatcggtacatgaaggctgggtgttcgtcgagcaaacagcgatcattggtgtcggtacgtcggtgaacgtctttgtttaagggtgggcaactcaagttttctcaccaggcatgttgttttcttttgttcagtacctatgtgacttcgctcagctatattaccacatggtgcggttcaaaccttcgattttggtggcatcggccgtgtatctcgctcgtctaatgacagacgaagccgatgcgtggacgccaacgctgcaccacgtcactcagtacaacccgtccgagctccacgactgcatcatagagctccatcggctgcacgcgatcgaggtgcagatagtcaacacgcagcaggacaaagccaaggccgtgagcgagaagtacctggcggacaagtttcactccgtcagcaccatcccgtcgtacagcaaggacaagctgacggagtccttcgaacagtacagtatgccttcttgaagaggcaccacggggagtggatagcggtcggcagtgccgcagtccgctggaagttcgtcaagcagggcactgcttcgggagcgctggcaccagctacttagatcgcgtctcgacgtcaaccgtgcacacaagcttccaggatcgatgtagcacctacagaggaagcaggctccctagtattattgtcatcattataggtcaggttacatttaccccgtttgtacccttcgcttcgttcactgcaacgtcccattagtccagacaacttgcaggaagtgacgagaggtaaatgagcgcatcaaaccatagcttgctatagcaagaccaattgcaactgtgtttcgtctgaggaagttgacgactatgccaagggaccgacgtgagctcggcaccaggttgttttagtgcgagacaagcttgcccatggggttctggcgagaagaaactccagcaacgcgcaaaatggcgaaatggtcaatttcgttcgaggcacaaagcgaaacttcgcctccggatttgggatagcctcgctgtaatctgaactcgtggcagacgagctcctcggcgtccgcgatccgcaccgagatcgccgggaacaaacttcagcttgggctgcagcagctatgcccaacaacttggtcgctctgcgtcgtcgccgtttaacaagctgaccagccagctgtcgcccgccatcttcatcgctgcagcagtagaagcacgacattgtgtcggtgcgtggtgggaccattgcagcgcgttgctcgtaggctgcattggcagaagctggagctgattgcttgacagctccgagcccttgcggctgtgaagccagcttgcgaacacgtcagtcaaacaatatcaccagccatgagacgtccagcttcggcgcttctccttctagaatgaagcccaaacagcaaggtttgtagccacttcaacgcgtcaaacgacccgattagaggtccctggccgaaaattcgagaagtagctactgttgccgcttttattttcatttcaaagtaactcatcgaaaactactcttgcattcaattatagagtcttgttacgatactaacgcgtttatggatgaatacactgtgaacgtaatacaaggtctgcaacccgtcgcaaagccggggcgcgcagctgtttagctactcgccagactgggtgtttgtatggggccgggcgttccacgatctttctctcctaagacgcccgtgtgctccacaccaaaacacaagcgtcgctgcctttttcctccccctttgccagccagccagccagtctcgaacctctccgcagtccacacagcgagactcgaccggcagcagggagaagaaatccctcgaggcctgatacatcaacaccctctcacacaacacacagtaccccccacccagctcgtagactagtcgacatgttcggcggcggcttcgagagtttcttcggcggcggcttcgagggcggccccggtggcccgtccaagcccgtggacaacagcaagttctacgaggcgctgggcgtgcccaagacggccacggccgccgagatcaagaaggcctaccgcaagctggcgctcaagaaccacccggacaagggcggcgacccggagctcttcaagaccattacggtggcctacgaggtgctgagcgacccggaaaagcgcgagctctacgaccagtacggcgaggagggcctgcaaaacggcggcggtggcgcggacgccagcgacctcttctcgcagttcttccgcggccagggcggccgccggccgcgcggcccgcagaagggcgaggacctgacgcacccgctcaaggtgtcgctcgaggacctgtacaacggcaagacggtcaagctggccgtgaaccgcgacgtgctgtgcggccgctgcgagggccgcggcggcgccgagggcgccgagaagacgtgcgacacgtgccaagggcgcggcatgcgcgtgcagctgcgccacatcgcgcccggcatggtgcagcagatgcagagcgtgtgcccggactgccgcggccagggcaagagcatccgcgagagcgaccgctgcaagggctgcaagggcaagaaggtgacgaaggagcgcaaggtgctcgaggtgcacatcgagaagggcatgcgcaacggccagcgcatcacgttctcgggcgaagccgaccaggcgcccggcacggtgcccggcgacattatcttcgtggtgcaggagaaggagcacgccacgttccagcggaagggcggcaacctcatcatggagaagaagattagtctggtggaggcgctctgcggcttcgagatgatcgtggagcacctggacggccgccacctacacattaagacgcggcccggtgagatcatcaagcccaaccagttcaaggccgtgcacggcgagggtatgcccacgcacggcaacccgttcgtcaagggccagctcgtgatcctcttcaaggtgcagttcccggagagcggcagcctctcggagaagcagctgagcatgctcaagagcacgctgcccgcccccacgcccctggcgcccgtggccgagtcggaggagtgcttcctctcggagttcgacgccgaggccgccaaggccgagcagcagcagcgcgaggcctacgactcggacgaggagcgcggcggccagcgcgtgcagtgccagcagcagtaggtgcgtccaggagaagaaggttagactcggcagaggacgagagcgctgtgtgcggtggtgtgttgaactcgcgaggcgagcgcccgggagttgataggccggacgctcgtctcattgtgatcactgcaccagtgctagcgaaccatacgttaagatgaagaaaagagagaaaaatgcaaaacattttagggactcggtgagcgcttcaatctcttcaacatgactatttggaaggcaggcgaaatgctagacgtccacgcctggtgacagtgtgctaacgtgggtcgtcgtgttcagccaaggtggatcgattgaggacacaagatccgcacgttggactttaaaccgtagcaacaagttggacagctaatgagctggttgataagctgagcagcaaagaccaccatgcgtccatgcgctgacgtgagcaagaagagctagcagtatcaatgactcaaaattgcttaatacaacaccagcagacatgacaactgaagtgggaaaccgcaaatgggaacgtcttgcattgattctttacgaaaagagctcaacacgagtcgcttccactccccggcaaggaaggaagttcacgctcgacgcctcctctaaataccgtctcgtggcaccttaggtcaccactcgacgctattcagagcaaacgaggcgtctgggaaacgcgtagatggcttcgcaatccagtagctgcttactcgtcgacagtgtcgttctggaggcccttgaagctggccacctgcacgtgctgcacgagcgtgtagagcttctccttggcgtcctcgtcatcgttgcgcttgcgcgacagacgcacgcgcacgcggtagggcacgttgcgcacacccttggaccagatgaacttgttgagcttcgagtcgatgcgcacgtcctgggtcttcatggtcacctgggcgaacttcttgatggcgcgcacggcacgggccgctttcttcttaaacacgctgtgaggtcacgcaatagcaagcgggagccacggagcaacgcagagcagagagaaagtcaaggaagtctccaaggtgggagctacggcgaaccgagtgggggaaaatatgcaggcactgcagtatgcagtgcgatatatgcaaaagggggtggaaaaaggataccatccgtgaagacgcttgtgcaggttgatggtgtagtcgcgggcgaccacgtccggcgagcgcttggtgttgcgagtcttggtttccttgaccatggtgagtgttcctggtgagctagcttttcccgaatgtttgggccccggccaatggcggaggcagctgagggcgacagctaggcacagccaaccgattcgcccgaaataccgacgggtaccggtagggatgtgccgaaaaggtggtacagcgagtgtggtgtgagattggtgtgtgtaggagttttggctacgtacgataaatagtaaaagcacataaaagcagtttttgtgtttagcagacatggctttacttttgtttcttgcattctctgctcgacaagctatcggtagtgctcgctgcctggatggcaatgctctgggttcatagaattgcagtatcacagtatggttattgtgctcgaatcgggcaaattgcaccgtagcaaataaagtaaacttgagtgacttctagatgaaaacaatcaacacaccaatagcatttgttgtcccgcttgccctttgaattgtggggcgagcaaagcagagcaagcttgcattcgaagatcagtatacttttaccattaaaataaaataaatataccggtaggggttatcagacaccttccggctctgttgacgtttcgaaacgatgagatccgaggcggcatcgcgatattttgaagagtttgtggagtctgacagtgaattgggacagtagtacaattggaggtaaaaggaaagcgaaactggaccatcctggagtcatgttttaagagctagttttgaaagaattcaacatttttttgtatggcagcgtagtcgttgctttttcgagggtttagtgcatttatgcatcgcgccatctatattcccgtagcgtcggtgccgacgggtctagttgagactcaatcccgactggtaggcacgaacgatggtacctaccatcgtacggttcatccgtgctgaatgagttgtgcagcgcgatcgttggcacaaccaggttgaaggcgggcatttgacttggcccacacaagatttgtcaagtcgccgaagattcccattattgctgacgaacgatacaagcagattcataccgcaggtgacgccggggtcgttactgctatcgccgaaaatgcagtatcgtgcgacgtgtagttaagagcagtccttctagctggtgccagcgcttcaaacaagtactcggcgtatttgttcagcgtctgcgggaacaacttgcacgtattaagactttcagcgatagtccgatctgcaattgcggcatgattgcaaaaggattgcagcagccttgttgtagggaggtttcattttttttcgtgatcgctgtagccatttccgcgtagagcccatcacgcttgggctgtattcaacagtacaacgcgatgaccagaagcgtgccttagcgtgcctttcagtgtgtcgctgctcgatggtgcctgcatgggtgggttctcgctccggactgcatgaaaggcgagaaacggcgacgcaccgcgggcgaaacgagctcagatggacgggggtcagcaacgtggcaaaggatccggccggctgctgcgctgctcgacgtggcacccaacgactggtgcagcgctttctgctttcgtgaggagctctccatctcctccctctgcgtgactttcaccgagagaaggataccggccgggtctaggtgccctctatgctagagagccctatgcaatgtggcaagtaccgacagccagcgccaaaaattgacgagagcgaaagcccacgcaggcgcagagcccgttaccttcaaggagctcgactcgactcgactcgggggtgctctactcgctatatgcacttgtctgcacttgttagcgccgtccgttattctcgtgtctcagtgacggcaaaactgcctaagtaacgtgaaggaggagcgccgcttgggcggccaatgggcgctggcccggaaacggccgaagtgcgcgttacgcccgatccaccccttgcctgcatgctgcgcctgtggcatgcgcctcgaaggtgcgggggctcaactcattcccacatttccccggtccgaccaaaccgaagctccatccacccctcacactcaacacaccatgggctgcagccaatccaaggcgaacgacgtcgtcgtcgagccgatcacggcgcccccgtccgagtgcggcaaggcctcgatggacctcgccttcaccgagatcatcgtggacgaccacgacgagacgagcgcgagcgccccgccgccgcccgtcgaggaggagctcgagaacgaggaggtgcaggaggagacccaggccccagctgagcccgtcgttgaagcagtggagcccatcgaggtagacgagcaagttgaagtgcccgcccaatcagacgtggcaccggcactccaagaggacgaggagctcgattcctcctcgtccgaagaagaagacgacgcacaacaacaagaagaagaagctcctgttgagccggaggtggaggcagcggacgagatcgagctgcagcagcagcaggagaagtccgcggtcgtggagaagtcgagcgtggcggcccccgtctggaccttcgcggccgagaaggtgtcgttcagcatcggcgtggccttcttccacatcacgggctctagcggccaggaggacgcggagagcgtgcacctggccaagcgctactccgagttcaaggtgctgcacgccgagatggccaagctcatggaccacgaagagctcccgagcatgcccggcacgtcgttcctgcagggccgcaacgacaaggcgctgctgcaggagcgcgaggcggccttcgtcaagatgctcaatgccatcgcggtgcaccccgaggcttcgcagagcgccgcgttcgccgccttcctggcctagagcgctgccgacaatgggccattggtagtctgggtatagagaggaacgagaggacggaggatcgagcgacaaaagccgacagcaagagcaacagcgacgacggcgcaaacgcagcagcgcgccctatagatatgaatcataagtctgtacaaacacgtaaaccatctccaccgcaactgccaccggcttcatccggtcgagattccttcaagctagccccctgcgactaacttaccgctagccttggaggatcgagacttcggtaccgtagctggccagttgagagtcaagtgagatcgagcgcttcaagcgcccaccccgcatatgtcggcgatgttgcgtgtgtctccagaagttactaatggctccatgcgccgatatgcatgtatgggtatgtattgctggcgcagctggctttgcgatggcgctgcagatggctacgagaacgtggtgctacctatacgttgcagagaattgccgccagccgacttgctggctgggggccgtctgggagaggcttatcggccggatgagctcattcccgaattctctcggtcccgcctactcctccccagagtccatcttccttccttcaccacctccactacaatgggctgcagtcaatccaagtctaccaccgaccaggtcgtggagcgcgtgtcggttgacaccccggccgtcgaggctccggccccggtgagtgtctccgtcgcggcccctcctgcctcggaggcgccgtccgctgcccctgcttcggtcgccgctgctgcaccagttgaagctgtcgaggaagctcccaagacggaggagcccgctactgctgctgttgaagaggaggtggcaccggccgatgagcccgctgcccccgttgatgagcccgtcgaagacgcggccaaggccgacgagccggccgatcctgcagaggccgaggaagagaaggccgtcgaggaagccgcccccgttgacgaagaggcccccaagtcggaggagaaggccccggaagccgagcccgagtcggccccggtcgaagccgaggctgcagttgaagaggaggcgcccaagtctgagcctgtcgctgaggaggtcgcggccgaagctgaagcgcccaagtccgagcctgctgctgaagttgaagcgcccaagtccgagctcgctgctgcggaggaggcgcccgtcgaggctccccagcccgaagtcgtggaggcccccgccccggtcagcgaggcgaaggcgaaggcgtccgaggtcgctgcactcaccttcaaggccgaggccgtgaccttcaacgacaagggcgtggccttctacaacttcgacggctcggacgccagcaacccggccaacgacgtgcacgtgtccaagcggtactcggagttcaaggctctgcacgcgcagctcgcgcagctgttggccgacaaccaggacggcaaggcgtcggacctgccggcgctgcccaaggcctcgctgctgcagggccgcaagaacaagaagatgctgcaggaccgcaagacgcagttcacggccctgctcaacgccgccgcggcccaccccgtggccgcccagagcgacgtattcaaggccttcttggcgtagacttaagggctcccgagctcgagcatcacactttattctccactatgtaaaatgtacaatgtctttcatcttatcttccgcccttgtttgtagtgcttttgatcaccatgacatacatatgagacgacggcaaacaaaatgttacttatcaacctaagtacgaatcgcgatttaggcgcataattggaaagagggatgtctcctctttcgttcgagcccctcccgagcttctagtatgaagaaacgaccgagaacgagaccgtcaaaaaatatatgtccgacttcaaccccgaaagggaattttttttttgatgaactggtgtaaaattagtcagcgaatccgacaatgttgtccgttttagctaattcgaagcctaacagtgttagaatctcacttttgtgccgtcacttcaaatcagcaggggtatatttttggattttttttagaaaatttgatatctggatgtaagtaacatttgaatgaactgtggacataagtatcataatgatcgactacaaccttgggctgcctattcttgctcagcaggcagatccgcagaagctttgcgcttcttgttcttttgcgtcttctttgctgcagtagccctcttctttgctgggttctttttcgtcgcaacagcctccgtgataccacgctggtcttggttagccttagccgccacggccattgccgcgcgatgctcaagtcgtgcttgtttccgtgacttggcatcttctccttcctgctcgctaggcttggtgtagaggggatcgctctgaaattcagcaggaacgtagggcctgatgttgtggtacatctgcgcaattttctcggtgttgcggacaggaggggacagcgtctcgatatggtccgtcatcatccgctgcaccttctccttcgtggtgaagatctcgtcaatttgacggctcaaactaatctctacaggttcgctctcggggcctttcttgcagacaacgacgcccggctgcgatgcgtccatcgtcaaaatctggaacttctggatgccgtcaagtcgtttgtacaattcggtgagaataggtgtgtaggacttgaacgctgagcatccgcgaggcaggtgcaccgtgattgagctcttggacgccgaactaacagcctctacgagctgcatgcgtgttgagccggttaccatgcgccttgatcgacatgttaccgtctcggatacgcatcttgtagcgctgcaaggtaatggggactactccatagcagggcgcgaaagtgggtcggcacacatgacctacgtaggggaggatgtacggaaacttctcacggtcaccccgtcgtcgcttacgctcaaccgtgggggtctgcattaacacagccaggagcgtgtacaagctcgtggtgcgctcttgctttgtcatctggtccagcgagcacagcaagaactccaactcacgagccttgcccttgacgcactcgttctcacacgcgtccgcatgaatcacctcagtcacacgggctcgaggactcgcgtcattcaaaaagatactaatatcctcttcatcttcggcttcactgctcgcgctctctgctgtgagcggttcctcgtcgtcgctgggcgacgcctcagaatcgggcgtaaagtcgtcgtcgctgctgtcctcgttcacctcactctcactggtagcagtgggatcgacaccacagacagaattgtcggcagaatcaggctcttcgtctgcttcgcgacgccgagcaccaaggggtgccgtggccgacagagtcagcgctgtggagagggacgttgtggccggcggagtcagcgcctgggagggcgatgtcgtggctggcagacccgacgtcgcggctggcggactcggagccgtggctggcgggcttggcgccgaggtggccggtggcgaggctgagagaggcagcgctggaggttgcgcaggctgcgcagttggcgctgcagcgcgcgaggtcggtgctgtcggcgtcgtgggtggtgtctgcatggctgtaggtagtggtccgagtggtttttcgaaatggtatccgtgccgatacacccccttcaaatttttgaaaatcaaaactcctcgttttctcacgacttcgtttagttacgattttgaacctggcctcttttaaggcgattatctcgataactctaaatggtggataagtaacatttttgttgccgttgtctcatatcgatagtgggatgcaatgcaatgaacacggtcaagtgtgagagcgtggatactgtagctgctagttcccattgaaccctcggcgcctacgacgttgccatatcgcgccagtcttatcgcttgtgctgtatgtcgcttgctcactcgttcagatggtcgtgcggtgctggccatcagcgcgacaatatgtagaccagcgcgaagctgtcagcgcccagatgtgtgttaaacggcagcgtaatagagcgagctcgtaagaaatgcgcagaggggaagctcaggtgctggccgaggccagccggcgttctcctgcccatgtgtgtgcggcactcgctgagaaatttggtcaatgcgtgggctgtgccccgacgacggacgacacacacaccagcagcagcgaaaaggagctggccacggcaccacgatcgaccaccggcagtcattctccattccccacggtctccgtcaagtcgactcatagtccgcccttgagatcaccactatgggctgcgctcaatccaagacgaacgagcaggacgtggtcgaccccaatgaccccaacgtggccgacttcaccggtaccgaggtcgtgctgcccgtcggcacggcggacacgcagcctcaggcggtggagaaccacgatgtggccaaggaggagccggccgtggaggtgaagactcctgactttgccctgcagttcgtaccgggcgaggtcagtattaacgagtacggcgtcgccttctacaacttcgacggctcgaacccgaccgacccgagcctcgacgtgcacgtgtgcaagcgctactcagagttcaaggacattcacgcggagatcgccaagctcatggccagcgagaagaacgtcaaggccgaggaccggaacaagttccagacgtacccggcgctgccgtcgatgcctccggccaacgccatcacctacgttctggggcgcggcaaccccaaggtggtgaaggagcgcgaggcgcagttcgtcaagatcctgaacgctattgccaaacacccgatcgcggcacacagcaagacgttcacggacttcatgacttagataatttacctactgcgctttgcgtcggagagaccgatcgaaggctcctgccaataaactatgcctttgccccttcaacttcttcaatccaattcatgttgtgttcggtagataagtgacttacacttaacgtttgattgaaattgagttgaacgtcaagccaatgctggattgtggcaaggccgagttcagtgctctgatacggtatctttggctcagcttggcgcgctgctcggtagtgctccggcactgtttaattgccatgcgccgggagcgcgcgctgtgccaatgatcaaatttggtgcgagtctgctgtcggatgctttgtgggattgcagctcctgcccgcaaagaacagcagaggagggttcagatggagaccggtttccgcgcgcgtactctactctgccgggttggtctctccttcgcgcgtactggagatatcccgatgccatctgaaaacttgacacgctaccaactcgaccgggcgtatcacttcccaaatttcgacgagtctgccaccgagtttccgcattcatatcactatgggctgctctcactccacgacgaacaaccccacgcagcagttcaacggcatcgagtactctatccttgagctgtcgatcgccaagcgtcctggagggccggacgtcggaccagttcgaacggaaaaggtaaagctgcgtcgcggcaaactgacccgaggaggacgacccgagttcgaaggtgacagagctgcagccaggaagaagacgcttccagtcggtgtgatgatattttcggtcaccaaagtcatcgcgaacgatgacggcgccatgctctacgtcttcagcgggaccactgccgaggaccccgcaaacgaagtggtgatctccaagcggtactcggatttcaaggcgatgcacgcgcagatgtcggagctgatggcgaaggagaggaacgtcccttttaaccagcaacacctcttcgccacccagccggctctaccggagatgcccaaggcgaacgcttggacctacgtgcgcgggcgctacagcgacacagtgttggaggaacgcgaggagcagttcacgaggatcctgaacgccatcgcacgccaccccgtcgccttcaagagcaagaccttcacggacttcctgctgggctaagtcgttgtgtaatttctagttgtggatcagattttataaggcaacaagacaagacaaaagatgtggttccccgagttgatgcggacgtgcaagttgacgtggtcaaatgtagccatgttctaaaatgtgctcgaaaacggcaatttcagttatacagcaccatctgcgtggtgaaacccatggctaacgcgttacgcgttgcgacatacgcttgcggcagtttgccatcggagccatgcattcgctttgcaagcatgggatcgcgggctccacggctccgtcacacacgcaaagttatcgattgtggcgcctcgaaaaaactatggcttcatcggttcagttaccgcgtgctcgagatggtaaactgctcttgagccgtaggttagttggcagagacaacatggctacacagacaggtaccctccgggtgcagtgttgaccggacggtatggagaccagcagcaccttcaccctaatgctcgtggtgttcaccaacctgctgtccgaagagaaaacatattctctctcgcggctttgtgtctcagtagcagcgtcttcttcgttggtgctcccaacgtttttctcggagatcgaccgaccgaccgaccgaccgcctgtccggagcctgcgtctccacagtcgtttgctccagtatccagctccagcgccagcgccagcaccacgaactcggtgtcgcctgtcaccatttcaatcgccaagtggccgcgttcagtaacccgcgcgttactctcgatcgatccactcttaccaactctcatcaactctagccccgcaagccccgcgttgcattgcattgcatcacacaagccatgggctgcaagaactccaaggacgcgacgctggcgcgagcaccgatgcgcccctcgacgccgtccttccacgcgcaggactcgaagctctgggcgtccgccagcgggtcgcaagccaacgagtcccgcgaggagccgccgtccttcgtcgtctcggacagcgccgacctggtcggcagctcggacggcgagccggtgcacggcatgatcagcgccttcaccttctccttcatccaggcgtccgagaccagcagcacctactcgagcctcggcctcgacagctcgctcgtgtcggacgagacgtcgcccgggccgcccgagtcgctcacgttcgccatgacgggggacccgatcgagctcacgcccattccagaggagcgctccggcccgcgagacggcgtcagcaatgcagcggtgcctccgagcaatagcgcagtaagcgagcctgagggcgagtcatcaccgggcgcagcggcgcaagtgctagaggcgagcaacgcggtgagcgagtccacggtgacggagtcgagcgagctgctggtgaacgacttggacgcgtcaggattcagccaccgcagcgaagagagcagcaaccacaacaacactggagacacaaggcgatccgtgacggtgtcggacggcagcgagggcggcgagtacatggtcacggagacgggagctgtcgtgcgtcaagtcggcaccgttacagaagcctcagctgctgaggagctcgagtccattgaagccgtcgctgcggcggtcgtgcaggaggtggttgacggtgctgtggctgccgcactagccgacggcatccatgaaccgcgtgatcgcgcggctctcatcgctcagagcagtctgcaagtggagatctcgagcgccgagatcttccacctcagctccaagcctcaaccaaacgacagcgcgtacgtcgccccgatctacgtcattgcgggcacgtcaaccgacagcaagggcgtggtgctgtaccacgttcagctcatggacgaggtcacggacagcgccaagtggacggcgccgctgctgcgacgctacagtcggttcaacgagatgtacgtgaagctcaaggcctccaagctgcccgcagcctccaagctgccgaagctgcctcgagccggcgtggcgcagttcgtgcgaggccgacagagcaagaagacgatcgaggagcggcagcagcagttctcccgcgtactgcgctacgtcgccgagcaccggcagctgcacaacagcgccgagttccagagcttcctcacgcagtagcagtagtgcgtcattatcattttccagccaactccgagcacagcgcgattttgctgtaccaagtcaacacctttgaggacgttagtcgccatcgtaagctacagttttctcgtagctgcagcaccgctgtctgcagcgtatgaacatgaacccattttgatcattcacgttgaacttgtctgctgatcccttccgagtttgccaacatttcttggcgtcaagaccggtctatgacttccgtggcactcgaatccacttggggttccagttcggcagccctagcgagctccagctggcgcgtggagtgtccccgtgcacgtacaataccacgtagagatcgatgcctgatggttgcgaagtggttggcagcaggacacccagaactcgaattgataggcgagcgagtcgaagtccaagtgcagcagctttcactctcaaatcccgacggacgactagcaagcaaagttgcgcggacagctctcgacgacgacgcacagttcaagcagcgtggccataacactatcgctgcagaatgatcgctgaagaagttgtcgccgcccaaaggatcgataaaggcacaatggtagtagaaagcccggaagcagaggaggacgcgctcacggtgtcttcggatggaagcatgccgcagtcgcagtgtacgccggacgaagcagactcagaggacgaatttgaagatgcggtggagcctccgtcgtccacgtcgggagtgctggtggcttttgattgtgccgcgccgccattgtcgggagtctacgaggacgcattggaggcgacggagcagcaggttgcagcggcgctggagtcgacaaactcgaatggaagtgagaggcagtcaaccattcaagaagaggacgaagaggaggaggaagacgtagagacagagactgcggagatcgaagctgaggtggctgcagccgtcgaggagatcgtggagctcgctacagggggcggagtgaatattagtgcggcttgcagtgatgaagtagtggagcttactgaagaagacgtgaatgctcaagccccggaggatccggttgagcaggaggaccagagcgacactgtcgaagacgcggaaagagacgctatcgtcgagcagcatgcagaagagcttgaatccagtcaagaaactatggaacaagaaggtgctgccgatgggcctgctcctaacgaacgaaacacttccgacgagaccacattcgtggaatctgttggcccaagtgacgacaacgaggaagctgatacgaccgacacccccgtcgtgagtgaagcacccggagcgaaacaagtgtctaacgctgacgtggtcgaagatgtttcgggggttatctcgtcagtggatgcagaagaggtcgttgagcaggatgcgatggactgtgtcgagaagactgacaatacagataacgagccgtccggtgatgttgaagacacctcaaagaaggaggttcaggtggcggatgttgttgccgctggcgaggctaacgatggactcgtacatgaagcacacgacactacagtggcgaacgctgaagtggcgttgaagactccagaggttgatcgaacaagcgaggaagtatcgattgagactgctacacagcactccagttcaagaattgacgcagttgtcgagagcgaggaatccgcgaaagagaaggctgctaacgaaggacaagtagctgaacccgccccggaagagaaaatcaccgaggaacttgtcgacgacgcggttgatgaagtcgaaaaggtagtcgctatcaaagacggcagccacgacgaacccgttgcgggagaggtagacatcgacgagtccaatacgtccgcagatgagcaagtcatgccacttaagtcgactgcgaacccggacgaaagcgtgaccgaggcagctgatgaagacccaggcgttggaacggagcaagaaccctcacaaccagaagaaattgtcaaaacctttcacgaagccgatgcgaaagaaatcaaccctcaggctgcaaacgatccggttgacgcggtccaagcggaggtagaagagaaccaacaagcagaccttgactcatcggaagctgcttccggtaacaccgacgagaaacctgaacgatgtgatgcagaacttgtagccacgccggaaggtatcaacactgtcatcaccgaggctgcagcaccagagcaaaacccagcagaagaagagccagaggcccctcctgcgttccaaggggcccccagcagctcaagcagaaagagcagcgaccatgaacatgagcacgaacatgggcgcaacctcgccgccgtttccctgctgccgcgactcgcgccgtcgtctgaaaccacgaccaccacgacgaccaccacgatcgagccggtcatcatgagctccgagagcaacgagatgctcgagggctacttcccgccgcagcggttcacgtacgaggtcttcggcttctcgatcgacaagcgcgtggtctactaccacgtccacaggagcgaccgacgcacgggcgtccgcgagccggccatcctcaagcgctacacggacttccgcgagctgcagacgcagctgctcgactcgtgcctccgcgtcgccgccgacatgccccggatcccaaagccgcacctgggcacggtactgcgcggctacaagagcaaaagaaccatcgaggtccgcgaaagggccttccgcgcgctgctgcggtacattgcgcagtacccggcactgcacggcagcgccatcttcgagaggttcatcaccacgagtcgggccacctccggcccgggctggatgtagacttcgaatgagatctatgtattccgtaatgaatgtcaataatgttgaagttgtcggcgccttagtgctgtccgtgcacgccacgtacgaattttgtgtacaaattttctggtcgccatgtgcaggctgcacacctgcagtctgcaggtgtctcatgtgctaagagctcagctcaggccatctgccgccacaaacgaactctcccgtcccggcccggagtcaatcggcattctgcaagcttcttcttcgtcgacgaacatggtggacgcgacctggtactattgcaacgttctggaggagtattacgaggcggttcctgctgtgcaggcccgtcagaacgcggccgaagaggttgagaaggtttcggtggtgagctcggagctgtcgctggacgtggaggaggtcgaggcggacgaggaactggcagtcgccagagcaacgtatgtgctgctggcctcggctgcgactacgaaggaggtgaaggaggagaagaagtgcgaagagaagaaggtggccgtcgtggagaaggtggagaagcaagaaccagtcgcccctgtggaggtggcggccgaaccggtggtcgccgagcaggtggtggctgagcctgtggtcgagaccgttcctgagcaaatcgcggccgagtctgttgcagccgaaacggtggccgagaacgagccgctggcggccgaggtggtcgaagagcaggtcgctgatcctgtggccgaggaagagactgccgctagcgaagacgttgcggtggcccatgaggttgcgacggaggatgaagtgatcgaagaagctgagccggtcgagcctgtcgctgttgcgtcggtggggacggagaaggagaatgttgctgagaaggaagctgccgagccggttgcgaacgaagaagcggccgccgaagatgcctccgagtctgctgctgttgaggaggttgtcgaggaagctgtggccgaggcgaccgcggttctggagaccgtgcacgacgctgtcgagactgttgcagtcgttgaggaagagatcgttgaggctgttgtggcccagacggcagtcgaagagaagaagcctgaacaagtcgagctggttgctgacgagcccgtggccgagcctgcagtcaccgaggaagcgcctaaggacgaagcgttggaggctgctactgaagtgcccgcaccgaccaacgaggactctgaagagaaggcgaaggacgaggagaccgtggccgaggctggccaagtcgcagaggatgaagtggtggccgaggccgaccaagccgcagaggatgaagtggtggccgagtctgtggaggttgcagtcgtagagaaagacgaagaggttggtgaagtggctgaggcaacgccggcggaggaggaagcaccggcagcgccgaaggccgacagcgacgacgtgtctgacactcagtcggaggtttcagaggcgcccgctgtcgaagtggctgagcctgctccggccgtcaaggtcgacgaggagcccgagtccgagatcgaagagacgatggtcattgacgctgacctggcggcaaaggaagccgctgccgtcgaggcgaaggcccaggaatcctcgtcattcagcttcatccgcaagaacagctacgccgtttcgtccgtggctgttgcggtcactacggccatcgtggctacgtttgtggcacgtaggtaggtagaaaggagctcgtatgcatcagctcttacatagaattcgtccagagagaatactcttcacgtgtaaattcgcataaaaactctcaggtttgttttacattttcattcgagcagtattcgtagaccaacgtgcattgtgtgcacaggtgcagatacgtctcgtaagtgcatgaagatcgctgcccccagctcaagttcgtcatatccataggatccgagatacagaccaacgctgacaaatggagcagacatttttgagtttgccgccacagcttggtggatgcaccgcaacatcatgttgagcttgatcttctccttcgcgagacactttcgatgtctcaaggcagcacctttggcccgaagacagagaatgatgaactccgagatctgcgcagtcggcagagaatctcgacgctccataaagcacaacgcgtgtttatctgccatttgctcggagtgtacaagttgcggctagctgctcgcacgcatctgttgtctcaatagtcaaagcggagtcagccatgagagctagacacatgctgccgacttggctgaagcagctggagcgcagcgagatgtctgcccacgcctccatgaggcatcgaatggaatgaccgcccatgccgcccagccgattgatccggcctaccgaaagcttattatccaattcgagccccaacgatcagatcatagcgactgactgtcaacgccaacaccaaacacataccaacaccaagaaacccaaaacaagataccaacatcatggcgactaccaactcgcagaacgagtacaccaacaacaccaaggcggccgaaccccgcctacaattgaacaccaacggcgacaaccacgccgagcccaagctcagcagccgtaccagctcgacagtagacacagacgacgtcgactcgctcgacagtgagagtgatgaaacaaccatggaccgggccgagttcttcctgtaccgatcccgatacagcgatgaagttacggaaatgtcagtgttgggcttcggatcacacatcggcatgaacacacagtctcaggaaaccgagacacacagcgcagcagacacggccctctctagtgaggcgacgacccctatcccatcggacgagttaaaggtcgtaacgactctcttcaagctgctgaaccaagttgaagagagcgtagcacagaaggagatcacgcgagtggagaatgacgacgaacgcctttcagcagcaaacacgtcacagaaagcggcatccagcggagaaagcgagagtacttccttagttcctgcttgcgatgtacgagcaaaagcggacgagctagatacttcggccgacgcgaaggacacgagtacttctaactccagagcaatccacgctattgccgaagctcttccgatccaagaagaagcggaaccaaagccccgcatcatccgagaatttgaagaggaagccaaaccaatccatatcccaatcaacaaaacagagacagaggaaatcccacaaactatggtagctgtcgaatccgccgagcctgtcgtcgaggctgcggtggtcgaggtcgaggcagcaaccgaggagcaggagcagcccaccgtcgaggtcgaggtcgaagctgctgagcccgccgtcgaggtcgaggccgtcgaggagcctgccgacgaggagcctgctgtcgaggagcctgccgtcgaggtcgaggccgtcgaggtcgaggccgtcgtggagcctgccgtcgaggagcctgccgtcaaggagcctgccgtcgaggtcgaggccgaatccgctgagcccgctgtcgaggccgaggaagtggccgaagaagtcgtggatgaggcggccgctgtcgaatccgccgagcctgtcgtcgaggctgcggtggtcgtggtcgaggcagcaaccgaggagcaggagcagcccaccgtcgaggtcgaggtcgaagctgctgagcccgccgtcgaggtcgaggccgtcgaggagcctgccgacgaggagcctgctgtcgaggagcctgccgtcgaggtcgaggccgaatccgctgagcccggtgtcgaggccgaggaagtggccgaagaagtcgtggaggaggcggccgctgtcgaatccgccgagcctgtcgtcgaggctgcggtggtcgtggtcgaggcagcaaccgaggagcaggagcagcccaccgtcgaggtcgaggtcgaagctgctgagcccgccgtcgaggtcgaggccgtcgaggagcctgccgacgaggagcctgctgtcgaggagcctgccgtcgaggtcgaggccgtcgaggtcgaggccgtcgtggagcctgccgtcgaggagcctgccgtcaaggagcctgccgtcgaggtcgaggccgaatccgctgagcccgctgtcgaggccgaggaagtggccgaagaagtcgtggatgaggcggccgctgtcgaatccgccgagcctgtcgtcgaggctgcggtggtcgtggtcgaggcagcaaccgaggagcaggagcagcccaccgtcgaggtcgaggtcgaagctgctgagcccgccgtcgaggtcgaggccgtcgaggagcctgccgtcgaggagcctgctgtcgaggagcctgccgtcgaggtcgaggccgaatccgctgagcccgctgtcgaggccgaggaagtggccgaagaagtcgtggaggaggcggccgctgtcgaatccgccgagcctgtcgtcgaggctgcggtggtcgaggtcgaggcagcaaccgaggagcaggagcagcccaccgtcgaggtcgaggtcgaagctgctgagcccgccgtcgaggagcccgccgtcgaggagcccgccgtcgaggagcctgctgtcgaggagcatgccgtcgaggtcgaggccgtcgaggagcctgccgtcgaggagcctgctgtcgaggagcctgccgtcgaggttgaggccgaatccgctgagcccgctgtcgaggccgaggaagtggccgaagaagtcgtggaggaggcggccgctgacgaatccgccgagcctgtcgtcgaggctgcggtggtcgatgtcgaggcagcaaccgaggagcaggagcagcccaccgtcgtggtcgaggtcgaagctgctgagcccgccgtcgaggtcgaggccgtcgaggagcctgccgacgaggtgcctgctgtcgaggagcctgccgtcgaggagcctgccgtcgaggagcctgccgtcgaggtcgaggccgaatccgctgagcccgctgtcgaggccgaggaagtggccgaagaagtcgtggaggaggcggccgcggtcgaatccgccgagcctgtcgtcgaggctgcggtggtcgaggtcgaggcagcaaccgaggagcaggagcagcccaccgtcgtggtcgaggtcgaagctgctgagcccgccgtcgaggagcccgccatcgaggagcccgccatcgaggagcctgctgtcgaggagcctgccgtcgaggtcgaggccgaatccgctgagcccgctgtcgaggccgaggaagtggccgaagaagtcgtggaggaggcggccgctgtcgaatccgccgagcctgtcgtcgaggctgcggtggtcgaggtcgaggcagcaaccgaggagcaggagcagcccaccgtcgaggtcgaggtcgaagctgctgagcccgccgtcgaggtcgaggccgtcgaggagcctgccgacgaggtgcctgccgtcgaggagcctgccgtcgaggagcctgccgtcaaggagcccgccgtcgaggtcgaggccgaagctgctgaggacgttgccattggcgggattgcttccgacgatcgtgaagatgccactctcagcgatgagaccggtcacaatgaatctcctgcagtcgcagatgctgtggttgatgccgccttgcagcccgagcctgagccggaggtcaagtcctcgtccaaggcgccgagctccgacggctggttcaacaacttgctgttccgcaagaaggcggcgcccatgtcagcgccgtcgctcgagtcgacgaccgacgcaaaggacaatgccgagcccgcggatgtcgcgtgtgtccatgggcctgtcgttgaagtcgtcgctgattcggctgcgcggatggacacacagatcgcgcaggaaggttctgctgccattccccaagatacccccgagcaagcagagggagacgcggccgttgcagagcagaccgaaatggagtcgcccgatgctagcgtggcgctcgagcgtcaaatggattcgagtcaagtcgtcagtgacgtcgagaacgagaatgtgttgaaggtcgaggcggtcgaagccgcctccgacaccgacagctccgcggagtccaagccgaacgctgaggccgacgttgacgagcaggttgcaactgccgctgagctgtcaacggacgaggaggcggtcgaggacattgctatcgagcagtcaatggataatgtggccgtgcctgctgttactgttgagcaggaggctgaaccggttgctgtgactgaagctgtggaatgtgaggccgagtcggccgatgccgtcgaggaagaagacacggtgtcgactaaggactctgaggtcgacaacgacgacgcaccacctgctgctgttgaggtcgttgaggaagctgtcgaagctgaggctatcgaggttgaggaaactgccggtgtggctgagaccatcgctgacgaagccgctgagcctgttgagcccgtggctgctgagtccgagtcggacgacattgcccctatcgaggtggctgtgactgatgacagcacggcggagccttcggccaacgttattcctgctgaagatcacgtttcagccgagcccgtggaggtggagattgacacatcggaggaggttgtcgaggccgaagttgtcgctgccgagcaagacgagaacgctaccgtcaccaccacagctgaagaggaagtcgatgcggttaacgctaccatggaagcagttgttgagcctgaaccggttgcggaaacagaggctgtcgccgaagatgttgcgagcgaacctgtttccaccgaggagttggcggagcctgcgactgctgtcaacgaaacctctgctgctacttctacggaaggtgacgtcgagtctcctgagcctgttgcccaagttgttgccgtcaaggctgctgtgaccgaagagagtccttctgagactgaagagcttccagcggaaatggctgagcccgtcacggttgaagaagttgtcacggaggctgagcctgcccaaagcgtcgaggccgagacctccagtgacgaagtggtcatggacgtcaagacgcctgctatctcagctgaagtggtcaaggaagacgacgttgacgcagagcagacacctcaagaggaggccgtcaaggagatgaccgaggaagccaccgctgcttcagtcgaggtcgttgaattcgctcctgctagcgacgacgtggccgaagaaccgaagtccgagcctgagcctatcccagttgagacgaagcctaccgatgccacgactgttacggcgaccaccagtgacagtgaggagaaggacgcgaccctggcgcctgtgcaaaagtacgaggtcgacaccaatcccatcagcgccgtggccttcttgatcggccgcttcgagcagatcgcgtcgcgcaatgcgatcgaagcggccaactcgcgcacgtcgtcccgtgtttcctcccgagtgtcgtctccgatgccgtcgcctccgtcctccagaccccacggatacatcttcgatatgccgatttcgaggagccgtgcatcaagtgagcagaaggagcttccgaaggagcccgcgaatgtggagacgatcgcggaggtcgatgagactgctgaggcagcggctgaagtggacgcacccaaggtggaggaaccagcggtggaatcgcctgcaactgaggctgaagtcgaagaggccacagtcgaagatgctgcatccgagaccggcgagcccgaagctgaggacgacaacactgccactgaagcacccacctcgccggaggttgatggtacagttgacgactctgctgctgtggaggtcccagccgacaacaccactgaggtcgagcctgaacaggctgaagcggagcagacaaagactgagggtgtcactgaagaagcaccggccgtcgaggagaccgctgacgctgatgtgtttgaggcggcagtcgaggaggatgctgaagccgttgagacggacactcctgccgaagaggtgactttggccacaacggaagatgccagcgactctgttgctgacacggaagacaataacgctactgctactactaccgacgctgacgagaccgctgccgaggcgaccgaggagtctgctgacgatgcgaatcgcgagacgcagacgatcacaactgtctacgaagctgcggagacgtcgatcttgtccatggacacccccgaagaagcgctcgacacccccgcaactgaagagaccgaggccgctgtggccactgccgactttaccaccgacgaggctattgaagcctacgttccaacccacgacgacgaaagagaagaactcaccccgaccgaggaacccgagaccgacaaccaaaccgaagaggattcgaccgacctggcgtctgcgacgaagatgacgcctgtcgctcatgaagagtccaaggaatcgccagctacggacgacgacaaccaccacctgacctttgacgagatggaggaagagcccgagcccaccgagagacgcatgtcctccattgcccccgaggcccccaccgtgctcaccgacgatgccgcggtgccgattgaagccaccgcgaaggctaccgtggaaatgacgagtcacgcgacgaaagcagtcgccgatgacgccacggcagcagagcccacccccgagcgcgactccgcgccccacgagcacgtggcgtacgagattctgggcgtcacgcgggccaacaacgtgatcatgtatcacatctacactttcaacagcgcgaccggcgagcgatccatgtcgatccccaagcgctactcggagttcaagctgctggacgagcagctccgagctctcaacgttccggctgcgcacgacctgccggcgctgcccaagcccagcgtgggcagcttcctgcggggccgccgcagcaagaagaccatcgagttgcgcgagaaggcgttcggcgacttcctgcactacgtcacgcagcacgaggagctgcgcgagtgcgccgtcttccagcagttcatcgccaactaagcgaaactagaggcgacgatgcagagggagacaagcaagaagaggaagcaagcgagcatgcgtgttgtatggatagctataggtaggatgcgtgtataaaccccggatcgatgtacattttttatactgttttgccttcaacttgaagttgccttgaacatgcacatcaatcagctgccgtcgcattgcaagccgtgcgagcgctcagttgccgtcgctgcggttctgtccgaagtctaatcttcgcttcggcattggcgcgcctgcactgggaagctcatccatcctcaccggtgtcttgcaggtgcggtccgtcaagctctcagtcgttgacaacgcagcgaacggagcgaatatcgctgaggcaggactcgctacattccactgcaacgtacatgtagaaattttctgcaattacctacgcgacccaaaagccaagacagcactacgtctacagttcatgtcggctcgacgcacgaaatgcagcggtgtcaggagccagctcatcccgtccattgcagaagtgataggtacctcggcgtgtctcgccttcgccgccgcgcgcggccgtcttcaattacaagtctgacaaccactaatggcggcggccaacgccgaggcgagaagcaaggttttccccgccccaaaagcgctctctgctttgagtctcgaagcgcctatcgccacctttcggtgctggcgagagagctcgaaagtgaacccatttgggatagtaacgtacgctacgcgcgacgtctcgcggcagaggaaagtgtatgttccggcaatagagacccgcccgacacaacccgcggcttgctagcagccagctttttgcaggcacaccctctgcatctggccgaaggctcggcggcatgaacattcgcatgccggccgcgccacggccagcatctcggcgggcatcagcgaagccatttttctcagggcaggcaactttgctgaaagcttcccgtggcgaaaccaacatggctccacctcatcacagaggctctgcccaagccgatgccgtctggtgtcccctatttgactatcttgacgccatctggctgtatcttgtccgtctgtcactgcccgaccttcataccgtatgcaatgcatccccagccggctgagcccacccaacctgcactttcctgctgtcgtcgggccgcgagccaggcgccgccaagcggaccctggtcagcacaacccgaagagcaacccgaagctcaagccgcagcgatcgccatggggtgcagtcagtccaagcccaccgacgtggccaacccggccgccaacgccaacgccaacgccaacgccgctgcgccgccggccgcggcgaagccgcaggagcagccagcggccgtcgaagcgcccacggccaacgagcccaaggccaaggaggccgaggaggagcacgaggacgaggcctcgcaggagctggcgcccgtcgcgcccgtgatcgagacgcccgcggcgccgcccgccacggagcaggcgcccaactcggcggccgtggacgtgcccgacagcgtgcgcgccaacttctcgtccttcaacatctcgttcatcgacccgaccgtgagcgcgcccacgagcgccacgacggagcccagcatcgcgtcctccagggtggcggcgatcgccgaggaggcccccaagcagcagcagggggagactgctgagcaggtggccgagcctgctgtggaggagaaggcctctgagcctgttgtggaggagacggctacggagtctgttgttgaggagaccaaggaggccgccgagccggtgaaagccgttgcggccgagcctgtggaggagaccaagcagatcgaggagctcgtggttgagaccaaaaccgaggaagccaaggttgaggaggttgcggccgagcctgttgttgaagaaaaggttgccgagcccgttgtcgaggagaaggctgttgagccgactgtcgagacagagtcggctgcgactatcgaggaacctgtcgcgaccaccgaggagactaaggagccggtcgtcgaggagccggttgtcgccgcagaggtcgagaaggtgaaggagcccgcttttgaatctgccaaggaagaagagaagctggccaacgttgctgaggagcaggccgtcgagaagaccgaagaggctgctgcccccgtggttgttgaagaggcggccaaggccgaggagacggttgctgtcgtggagcctgttgcggagacggcggccgttgagcctgtcgcagtggaagagcctgctgtcgtcaccgaagagcccgccgcccccgtcgttgaggagccggctgccgctgttgagacggaggccacccctgtcgaggagacccccgctgctgttgaggagcctgctgccaaggttgagaaggaggagagcgttgttgcggccgaaccggccgtcgtcgttgaggagcctaccgctgtcgaggagtctgttgaagtcgttaaggcggggaaacctgctacagaggccaaggttgaggagggtgctgctgccaaggttgacgagatcgccactgagacgaaggttgaagaagccgctgtggtgaaggccgagaaggccaatgaagctgcaaaggtggaggaaactgctgtggagaccaaggttgaggagcccgttgctgtcaagacggaggagcctgttgctgccaaggtcgaagagcacgttgctgccaaggttgaggagcccgtcgctgccaaggttgaggagcccgttgctgctgccaaggttgaggagcccgttgcagccaaggttgaggagcccgttgctgccgccaaggttgaggagcccgttgcagctgccaaggttgaggagcccgttgcagccaaggttgaggagcccgttgctgctgccaaggttgaggagcccgttgcggctgccaaggttgaggagcccgttgcagccaaggttgaggagcccgttgctgctgccaaggttgaggagcccgttgcagccaaggttgaggagcccgttgctgccgccaaggttgaggagcccgttgctgctgccaaggttgaggagcccgttgcagccaaggttgaggagcccgttgctgccgccaaggttgaggagcccgttgctgctgccaaggttgaggagcccgttgcagctaaggtcgagaaacccgttgctgccaaggtcgaggaggctgtcgctgctaagcctgaggaatcggttgctgccgaggctgagaagcccgttgccatcaaggttgaagagactgttgctgcgccggttgacaatcaggccgatgctgctgcggagtccgacggcagcaccacgtcggaggatggcgccgaggcggaagactcgggcattgagcagcctaacactgctgaagagcccgcagcggcccctgcctcggtcaagaaggacgtggctgagccccagacggagcaggccgcgcctgtcaaggagcccgtggcctccaactaagtatgaaacccgctgagaagcgagcccagggaccaagtgtaaggtccactttcttttttgattcctaacgtgaagcggtcgcccgccacgacgtagatacgaatgtaggaactgtaagttcatgcacatagatcactatcgaccttcgtttaccttcttacattttgttcgaacaggtccatgagtggtcaagctgtagccattgcagaataagatcgctttttgtaacggaaatgtgacgaggcggtgcagtacttgctgtagctagacaaacttaattcaaacaaggccttcgatacgcgctacgcagccccggacgttgccagcctggacgttcggaggagccgctggttctggtggctcgatggagcatcgtccgagttggattcgtcggtgctgccgttgatctcttcgtcgcgacagacggacgccattgcgttcgcacggcgacgcagcagactcccgtaccccaacaccagcgtctgggagaaatcgcgctgcttgatggactgccacagcttcgccgacaggttggtggcagctaggccaatagacgagcgcggtggctcttccgaccgagcacagcgcgcgatggcgccacgcagcagcgccacaaactccttcttcttctgctcgctctcgcagtgaacgatgtactgacgcgccgttcgtcggtatctccgtcggagcggagacgctggagaagacacatccatagggctgtcctccggctcgtcgactgcgagctgcgacatacttctcgacagcgagtagcgccgcttgaccggcctcttcaacgtactcgggctgaggttatggcaattgcagcgaccggttttcgatgccagcagagcgaacgaccgcgcgcaggactcagactcagtaccgtcttcagtctcattggcctcgatcaccgttgcacacgaaaggcaaatgtgccggcgaacacgcagtcggaagttgctcttgttagcgatgagcagtgcgtcggacaacaggataacccgctgtcggtccttgctgcgctcgtggccattcgaggtgaggctgtcacgcaaggccgtctcctccctggcgattccgctgttttctcctcccagtagctccatctcgctgttgacgctgtgcgtcgaatcacgaggctgttggcactcgcgcttctgtaaacgtcttgctcgatgcaagtgaagagcccgagccaagcgtgcgcgtcgatcgatcagttgaacggcggctggcatctcacagagtagcgtgcgtccgggacgcaagagctccaacttggccgcagcctttgtgttgtcgatgctgttgttgatgctcaccaagcgcacgttgctctcggcgtctcgaacacgagcgttcacctggtcggacactcgttggatactttccagagcatgttgagagagaagcgcctcctctggggtggtagcgttctgcactagagagcgaaatagcagcgagtaccgacaaatgcgctgcacgggcttgatgagatccgacaccgcgtcaaacgaagtctcgtcattgttgttgctgctgctgctgttgttgtcgtcttgagacagcgtgaaggcgtcgagaagcttggcgtgcgacttgagctcctcggtcgctgggaggtaactggagcagtatagcgcgtaagctttcatgtactcgacagtggaggcgaacgctgcggtgactcgagtcacggcttcaagtggcccagatccagagctgccgttcgggttcagagcgttagaaaagttgaaaaagcggcgctgttgtggcggctccatgagcttgagcagctctttgtgaaccccgaggatgaagtgagctgaacagcgcagagccgagaacgacgggagctcctctttcgtcttgatgtatctatccgcgaaagcagcgaacggatcgaggaatcgatcgacaagcccggcgatgtcggacacgtagtccctctcggtggcgagcatctcggagcagattcgctcgacggttgtccagttcttcttgcttgggtggtccaaagcctgcaagtgacgcaagaagcgaggagaccgctcgtcgtacgtcattttggccagccgcatcacctgcggcgtgcgtgcgaccgtcatctcgctgatgggcagcttcggcggcaccaccgagcccggcattgtcaacggcaagtacgcgagtgcgagcgtagagatcttagctgtgtcttggcatgaacgggccgactcgaggtcggacttcacgttgagagaggcgcgttgcaatctgcgggggttagctgcttccaacgcgccgctagtggtgtggttgaacgccgtgagctttgcgcgcccatatttttaggcgcagcggcaagtccgctggagcgctcctcgcttagcttcaacatcttatgcattggctggcattgccagcattgcgcaggtggcaggcattaaatcaaaagcacttacttaattgagactcgggttgccaccaaaaatatgcgcatatccacaaggctgcaggagcttaaaaatatccgtactaactaacttcttggcacacttcctcattgttgcgctcacacccaaagctcaacggcggcggccgtgttgacacgcagcaagcgcccacttgcccagtgaaggaccaaaaagggcaacttcaacacaacatggctaccccttcgaaacccgctccaccacatcacccttacacaacatccttcccggctaattccgccacttcctctccagccatcatccgaatcacttcgtcatgggtcgcaagcagcctcctccgcggcgcggcgccaagcgccagggcatcgccgcgcaggcgcttcgggccggcggcaagagccagatcggacagcagaaccgcgcggcgcccaagaagctcgtgggcaagcaccagaacgcgcagaagctgcagcagaagcgcgagcagctccgcagccagcaggtcggacggcaccgcggcgtggcggccggcctgagcctggccgagctggccggccgcgccgcgcagagctcgcagcagttcgagcagactcagatgcagcaggagcagaatcagagcgctgccggcgacgagctcgtgatcaacgacgcgtcgcgccgcgcgtacatgaaggagctgcgcaaggtcgtggacaaggccgacgtggtgcttgaggtgctggacgcgcgcgaccccatgggctgccgcacgctggacatggaggacgccatcggcaaccgccacggcaagaagctcgtgctggtgctcaacaaggtggacctggtgccgccgcacgtgctgcagccgtggctcaagtacctgcgcggcttctacccgacggtggccttcaaggcctccacgcagaaccagtcgaagcacttgagcgccaacttcggcaaggccgacaaggccgcgggcgaagcggtgagcggcagcaaggccgtgggcacggacgcgctgatgcagctgctgaagaactactgccgcagccacggcgtcaagacagccatcactgttggagtcattggatacccgaacgtgggcaagagctccgtgatcaactcgctcaagcgcagcaaggccgccagcgtctcgagcactgcgggccacaccaaggtcatgcaggaggtgcacatcgacagcaagatcaagctgctggactgccccggtatcgtgttcgaccactcggattcgagcgccttgttgctgcgtaactgcatcaacaccgagtcgatggcggacccggttggagctgtgcaagtgctgctcacgcgctgccaaccggcgcagcttgcggagctgtaccagctgcctgtggatgccgtgtccaagtgcttccaggacgccgtgcagttcttggtgctcgtggcccagaccaagggtaagctgggcaagggaggcatccccgaccgccaggctgctgctcgcatcgtgctgcaggactggaaccgcggcaagctgccgtacttcacgccgcctccggaccagagcgtccaggtgctggacacgcagctggtcaccgcgttcggccaggagttcaacgtcgccgatgaagaactgaacccgacgagcatcttcctccaggaaggagacgcgaccaaggaggccagcggcccgcagtgctcgatccctattgcggccagcggcaatggcgacgtggctatggcgtccgagacgacgaatgaggccacgcccgcctccgctcgtatcagtcagatgctgggtgattccgactcggactcggattccgacatggactcggactcggagatggccgacgacaccgcagaggctgcaggctacacgctgccgcacgccgctctgtcgacccaggagctggccgccaagctggcccaggacgctttgaacccgcagacggctctggctgcccgacgaaaggccaagcagtggcgcaaactcaagcgccgggccgctcgccagcaaatgggctcagaggccgagaactcgttcagcgagcaatttggtaacatcgtgggcattgcgcctccgacgttcatgaacccctttacgactcagtagaccgaccagttttgttcatagtactacgcaagtcttagacacacataatgctattcgattgtttctcttccggcttcctttggtctgctgcgtacgcatggggcgcagctagaaaatagcagttgcattactcaatgtagtgtccatggacacggtgatcgtagctcagtctcgacgactgtgactaaaactctctctctcggcccttgccttgtcttgctttctttcttacactctgggggacgtcagcagcttcggcgacgtgatggcgttcggaggcgtcagcgccatctcgtactcgatgctctctctgcgttcgtgcgaggtgacgggggcgtccgtctcggtctgcttggcctgatgtctcttcctgtagatggcggcgacggccacgacggctaccagagcggccgcagcagcgatgcctccgacgaggctggcgttcacaccggagctgccagcaacgtcgccagaggacaagttgaccgtggacgagtctgcggtcgtgctgtcgtcatcccccacattggcgtcgctctcgctgtccccgacgtctgcgtcctccgagccgctgttggacgagcttccttgggtcgtcgtagccgcgggagtggcggagggggtcgtcttagtggccgccggcgtgggggtcggcgtctccgtcgtgttggtcgtcgtggccgccggagtggctgtcggggccgtggtcgtagcggccggcgtcgccttgggggccgtggtggtagctgcaggggtggccttcggggccgtggtagtcgccgcgggcgtggcggtgggggccgtagtggtggcggccggcgttgccacgggggcgctggtggtgggggcgggcgtgggcttctccccgcagttgtagagcgggcgcagctccgtggtctgcacgaaccagctctcgtcgtagtcctcgttgccgtcgaaggagcccgagccgtccaggtccacggtgtcctctccgctgtagtcccacgtctcgcactcgctcttctgctccacgacgccgtcgcagcccacggtgggcagcacgcagccccaggtgtctccgttcacgagctggcacacggcgtcctcgagcgccacgcagctgccgtccttgtacgagggcaggtacgcgtggcagtcggccacggccacgtcgcccgccttggggcagctgaagcccgcgggcgtcgagcccgagccggcgcacagcgacgacgcgtccacggacagcgagtacgtggcgtcgcggcacacgctcacgtcgacggtggcgctggcggaggcgctcagcgccgcgagcagcagcacgggcagcgcgcgcatcatgttgggctgagtgtgcgtctgtgaggaggctagtttggatcaaatgtaaagtaccgcgcaagtttcgcgtgcgggtaactggccaaaagcgagaatggcgagctgttgtgaactggcggctggacatgggatagtcggaccgctcgttgcgtggcgatcgccacctgtaccactgtgctgcaaaaagtggcgactaggaagcggaaaagaacgataagattaagcaggataatgcgtccatgtcttgttgtttgtattgaaaaggctagaatggtggaatcggattggatagggtattaattcaggccgttgtgagccggcggcaaattttgggcgcaggtgattgattgggtggccggacgcaatttttgcgttgagtgattatcacggtggaaatcaacgcgacagctgggcgccggtgggcgccacgagagcgggcaggcgggtttgcaccggcagcgttgcgcctgcaagtgcctgcaggcagcactcggcaacggagccagcgccggcggacaccgagccgaaaccatgttcgtctgcgatcgtccatcaaaacgccagagtggatttctgacagaaaccgggcgccacacagtacatgaggacccgtctgatattgacctattctcatactgtttcccatttctaaagtaaatgggctctaaattatgaagatgggtccgcgctggattttatgggctcctgctttcccgggctgagctggtcggcggtgaaaggcatcctgggcggcggcggcggcttccgcgtgtcctcgatggagttctttcgcccagaacaccggtggtcccccgcaggttctgttcgaccacacgcacaatccgcgagcgccgcggcgctgacgttggcggaaccattgaccttctcgatgctacgttttgcgatgcgaccaatgagttccgacctgcagcgccggggtcatttgttgatgctggagcgcgggattccagctcgaacggcgccgccaaacggagcagatatgctggctcaatcgttgcaaatgcttcgttctgaaggcgtatacggactcgcgtgttttgatagctgtgcaccccaaaataaatgggctctctgtgacaaggcaggtcgtaagatatccaccttttgtattcagctcttttcgatggtgtccgccaagaatcgaccgcgcgccggcaaatggccctgccaaagtggcagcccatcggggcttcaaccgaatggtgtcgttccgggcttccacacgacaccatgccgtatgtcgctaccgttgcttcgatacacaccacgtcgcagaatcactttacagccttcgagaagaccaaaacggcagccaggaacgggtgcttgcggtcggaatgctgcatccatcgagtttgtcctacgggaatggattcctagcgcatggaccgctgtgtttcaaagtgtgaacacaagagaacgaagctgttgaaacattacgacatttagcacttcgtcactgccgaggtatatgtgtacatcctgatcaatcgtcactaattgcaaccacggtctcggacgcatctgcagtctcctcgctcgccttgtcgtcctcagcagccttcgtgtcctcagcagtagacgacttgatgccctccgtcgtcccagctgaagctcctgctgtggttgtcgccgttggtgtcgtctttggcgtcttggccttcgaacttgcagctgtgggcgtcgtggccatcttccccgtcaccaccgcaggcgtcggaggcacagccatggccacatcttcagcctcatcagcagagtccgcatcactcttttcctcttcatcctcagactcgtcagcatcctcttcgtcttcctcgccctcctcctccactgcctccatcgtgcgcctcttccttgcgaatgcaatcgcgactgcagccacaacgacagcaacaaaagctgccaccgcagcgatcacggccacgacctcgtcgctgagccctccgaacccggcagcgtccgtagcggcaaacttcaccgaggtggttgactttccagagaaagcctcctcatctccgacattcgcgtcaccgtttccgtcgggcatagtctcgccggtcccgtcctgtgtagtcacttcaccgtcagtctcggcgctcgacgacccgccccacccaggacctgtcggcgtctgtgtcggcgtcggtggctgcggcaccgtgccactgaccgtagtcgccggtgccgacgtggtggtcggagttggcgtctgcgtctcggtctgcgtggcatctgtagttgccggtgcgggcgtagacgtcggggcgtccgtctccgccacttcgccattatcctccgtcgacggcgtcagtgtgttcggcgtctccgtctcgttatcctccgtgccatacgacgtcaccgtggtcggggtcggcgcctccgtcgtctccgtctccgtgtcgttgccctccgtagccgctggcgtcgcagtcggttccggtgcagcggtcgttggagcaggcgtgggcttgtggccgcagtcgtagagctcccggagctgggtcgtctgcatgaaccagctctcgtcgtagtcctcgttgccgtcaaacgacgcggaggcgtccaccgagtcgtctccgctgtagtcccacgtctcgcacttgggctcctccacctcgggggcggcgtcgttgcagcccacggacggcagcacgcagccccacgtgtcgccgttcaccacctgacacacggcgtcctcgggcgccacgcagctcccgctctggaacgacgcgagcgtcgagaggcagttggccacggccacgtcgcccgccttggggcagctccagcccgcgggctccgcgcccgcgccggcgcacagcgtcgcggcgtccgccgagatctcgtacgtggcgtcgcggcacacgctcacctgcacggcggcggcgcgggaggcgcccagcgccgcgacgaacagcgagaggcgaagcggcggcatgttctccaggatcggtcggtcgtcgaggaatggcaactgggtgcggatatgccatggcggcagctgcctgatattttttcggctttaacagggtctgcgcggtgattggctgcaaatcagctggccggcttcaacttgacaagcctatggtgaccttccagcagaggctccggtgctacgcgacgagttcgctgcagcttcagcagtagtgggcacaattgggctcgttttagtagaatcgactggaaagctgcatccgaccttgggcagctcttcgggacttggacctttgtcttttgcggtctcatttccggtgacaccgatggtgtcggaccttacgctttcgctactggagtcaagcaggtcgattacatcttattgcttctggagttcatcatcaggctgtgcgttcgagagcactgcgcatttcctcttctcggcgatgagttgcgtcattacttgggccatgtacccgcaggcacgtcgctgctcggtcccagtcggtggttgatctttcgagctggaaatcgctgactcagtcggcacagactcctcgttagctttgatctcaatgtcttcacctgggttcttttcaacatcgtcagccacaacctcttcgacctgcgccaccgcttcattcatcgcctcaagcgccatctcgagctcctccgcagtctggtcctgcaagaatgccatgtcacgctgccagttggggaacacgcgcttcacgacaactggtacatcgtcattgacactaggagtccacctagaggtggcatcaacactctcagaagcggacacggtttctgctctagcctccgagtcaatttcgcgctcgagctctgcatcttcgtcgtcgttatcagcgctgtcgacgttacccaagtcaaagctatcgtcgttcacatcgtcatgatcgtcaagaaatgtccgcagcacgctgttgcggtacagcagcgtatcgcgctgcagaccaaaaagctgctgggaagcgcgtgcccacatggaaatcgcagccaccgccgctaattcagcttgcttgtcttcgtcaaaatccatagcatcttcagcctcgctccacttactcggagcataccgcttcgccacgacggaaccaccttctgcctctttgtcgcttgtatatcgatgtactgggtgcgcctcccggtcgcctgggaatatcgcatctaacgctgccttcagatccaggaattttgtcaccttgcctggagggagcacttgggacttccgtagtttttccttcgccctctccaatctattcaacgttttcacgaggttcactctccttttagcaagtttcgccatttgagcgtcgagctcctccagtttcttcttcgtcgctttaagctgcatgtccgtctgctgttccttattcatcttcggattgccattcagcgccagagctagctctatactttctccagcattagctcgctttctctttctgggctttcttggcttgggtacagcggcagcgtcgtcgcctgcaccatctcctgccttcggctttctcggtttcttggcccggatggcaccgcctgcagcattcgcacgcttccgtgacttcggctttacttcttccgcacttgtagctttgaccgcaactcgaccgcctagacactcgttaaggtgcgcttgctgctcgagcagatccaacagtccgatcgtcgctttgcacacggtacacgtcgcttcctcgggcgtagattcatccacacctccagttctgcatttaacttccttatcacccttcgacttctttttcaaacttgattcaacgtcgtccttcttgctctcctcctcgtcatcactacccaccacgctattgagcggtttgggcaccaagtcgtcatacgcaggctctgtatcaggttgatcagcacgattgtcagtatcgcccggtccagcagcagaagccgaggccgaagctgacgcagagacggaagctgaagctgaagcagcagcagactcctctctctcctccgctgactcgtcgtccagcacaatcaccacgggcgctgctgcaggttgagccactgaggaggaagcacttgacgttagtacagagccactcgcaggtgcaatagcagaactagcattaacactagcagtatcaacttctccgtcctccccacactgcgagccgtgcacaaccttcacgaaccgcaggctggtcctgcccactgccacctggtctccgtcactcagcggatagtcctgcagaggcttcagcgggctgccattaagtttggtcccgttcgtgctcttgacgtcgcgcagcgcaacgcccgtcccgctctgtacgaggcggaattcggcgtggacgctcgacacctccaagtccttgggcagacgcagccagcagcgcttcttccggccaatggacagcgcgcgcgcaagtgaagacggtgatggggctgcgtggtctttgtagcagtagcggtgcacgctgccgctgtgcgggccccgcgtggcctccagccgcaagcagcacggcggagacgccgccatccgcgtcaaaatgtgcagtcaaaaaagtcaaatgttgcacttaccaatagaaaggcgggaaacttggaaattcagattagaaacgtttcttacattagatacgcattcactccggttgaagttgaccttcactccacatcgacaagcgtagtgacacgtcactgttccgcgttttggctcgcacaacgcggcgatatttcgggtcagacaagagggagggaccttttcgaggacgcgaaatccgttgtagcagcgcggcacccgccccccatcgtgccattgcgcctccgacagtctacacccgagcagcaggaacccgtgaacaatggcggcggaagcggaggcggcgctcaacgcgctcaagaagctcgaggccaacaaaacgtgcgtcaactgcggcaactacaaccgcttcgggcaccagaacatctgcgagaaggtgcgcacgttcgtgtgctccaactgcaagagcgcgcaccagagctacagcatgcgcgtcaagagcgtgagcatgagcaactggaccatggacgaggtggacgccctgcgcgagcagaacggcggcggcaacgcggcggccgcgcgcgtttggctcggccgctgggacgagggccagatgcgcaagcccaccaaggacgacccgctcgactactacaagcagttcatcaaccacgtgtacaacgacaaggccttctacgacgaggacggcgccagcgcccccgtgtccagcagccccacggccaagagcagcagcagtcgctcggctgcagctgcaactgcggcggcggcggctccggtcaccaacttgctggactttgacgccccggcacagcaaaagtcggcgtcggccagcttcgacgcctttggagctggcagcagcgctggaaacgatgggtggggcaacttcgctaccgctgctcccgctccggcgtctggtaatgacggctttggagcctttgcgtcggctccggccccgactgcatcgagcaacgatggatttgcagacttcagtgctgcaccggcacctgctagtccggatgcctttggcgcgtttacctcggcccctcctgctccggcgtcgaattcgagcgccaactcgttcgacccattcgctgtttccggaggaagcgctatgcccgcgtctaatggagcggcgccatttgaccccttcgctcctgcgccgacggcccagagtcagcagccgaacagtaacatcatgaaccagttcaatgcggcgccggcgcccaaggacttcagcgtgttcgacggactgtcggcaccgtcgctggcgtacggcactcctcagcgcaacaacaatggatacggccaggcgcgtggtcctagtgctggaatgggaatgcaaggccaaggtcagccgcagatgcacatgggaatggggatgcagcaaggtatgggaatgcagcaaggcttcggtatgccgcagcagcagcagtatggaggtttccaaccacagcagcagtatggaggtttccaaccacagcagcagtatcagcagcagccgacgatgggcggtgccaatactggcgcgaacattagcacgtacttttcgccgaacggagtcaccgcaggcggcaaccccggcgcacgctcaaacggaagagatccgttcgccggcctaggactgccgcagtaggctggaagtagtagaaaatggtacctaatgcaaatagctaacatgaacgcacacatgcgattgaagcatgtgtagttgcaccgtatcactgtcatctcgacaaaaagatacttcttggtaagatgacccaagcgctgaagggtccaagatgccatcaacacaagaggcccgagcatcaaaaacaaaagtcacgtgagattatagcgcagctctgtctgctctcctctctccatcgtatgctgccacgccgttaaacacaattaagccagccagacgactactcgcggagtcaaaacggggcgattcgaccctctctctcttcgtcgtcctcttgggggtttacgtggccacggccgtggcagcgacgccgttgccgttggccgtcgcggtcgcgctggccgccttgccgccttgcgcgatggcgggcttggcctgcgccggcacgagtctcttgatcacggcggagctggcggcgccgaacatggggcggaactgcgcgtagaagaaggcgacgaacggcacgttggccagcaccgagtagaagtcgtagtggtccgtgtgcgacgcgatgcggccgttcttgagctcgagcaccgagaagacgcgcagcacgatcttcatgaagctcgggaagggcttgaggcggaagacctgcgagctgtcgatcgtcagcaccgtggcgcccgccatggagccgcgcacgagcgtggccttggacgccttgacgaacttggacagcacgcggaactgcgcctggatgttgtccacgccgcgcaccgacacgagcgggtccgtgaacacggcgtcggacaggtagtacttggcgatggtggcgtcgcggctggcgctcacgtcgtacagcgacagcacgttctccgccagctcctgcgcggtgcggttagccatcgtctaatgctgtgcttggggccttggtctaaactgttccagaaggggttgggaatggcaggcaggaaactgcggcctgattcctgttccgcccttactccgatgctccaatacacttgtgaagactagagtgtcagcggcgcagttcgtgtcaacggggccttcttcgtaccatgtttgtggtacagaggagagaaagctgtagccatgttgtcaccgagttgaagtggatgacgacgcacgtggccaggagcaggtagatgcccgaggaaatgtgcacgttgacgagcgcgacggccgccatgaacacggcgaggaaggcgtcgtcctggttgaagcgctcgaagtcgatgccgcgtcggatctcgagcgcgcacgcgatgaagtccgtgacgactttcaaggccgagctgcagccccgtgatggctacattcgtgccctgactggtattactgctgctgctgctgctgttgctgatgtggtacttcgggtgcgagccgaagaagaagaggatgccgtatgagcagcccatggcgatgtactcggcgtacatgtcggcgtacacttcgtcggcgtgcagggacagcagcctatgaacgcggtcttgaatcggatcaattatacgcagcgaagacgtggtgcggagaggcgccacgtggatatgtgagactttggtcgttcctggcgtggggataacaaccgacgcaggctgctgagctgtaactcgacgcacatgccaccacacgtgcgctgtcttggatcacttccgccagagcgagcagaaacgaccccacgaccgtcatggacgcgttgtcttggcacagcagcaccgtccgcagctgagggtcgatcagaatcgtaggggccgctacagtgatggccatcatgcgcatgttgggcgtccgtctcttcttcaccatgaagttcttggccagctcctgcagtaaaagtttgagggagacgctgcacactgcgaagagcgccaagtcccattgcgtggcgatctcgacgctgctgacgatgtgcacgtatgcggtcgtgaagagcgcggacgccatgagaggtaaatcgttgagaagcacgcgaagaaacctccgccggtgaggcgacgacggctttttgcgcggattcttttcggattgacggcgttggtatgctggcgcgttcgcacttggccgcgcgtggtctccgtccgaaacaaatagcgagactggacgtccgtgcagccgacgaacacgtaaaagcacaagtgcgtgaagtacacgctcactttggagctgtcctccagccagcgagacagcaagatacagccggctacgacacataacgcgacaattacacagtacgggagtgtaagccgggcgaatctcctcacccagtagcgaagaggtgagcgggtgttgatgaagcccgcgagctgctcggtaagcagcaacgatatgaatatcgcgatggtcacgacacaggagaaaaggtgaaaccataacatcttggccacgaggaattcctcatccgattgctgccgcggggtgcgacccgagaagatatcgccgaccgtacagcagaacgcgaatacccaggcgatcgtcgtactgaggagggagttctgaaggatcttacgaagtgtccgggctgtgcgggtgacgattaaacctggtgtatcgctctctgggttctgtgcggtggggatcgctgcgcgcacgaggttaactgaagccattggccgcgctagtgagtctgcttgggcttctcttcagaagggtgaaacatcagcttcgttggcgctcggactaccggtagccttgggcagacacaagtaccatcaaacgaatgcgaaagtcgacaccctgttcctattaaagctaatgtcgtccaactaagctcgttgttattttgaatgacgctacgccgcgcagctgcacacggagagctatctccacgatgagtaaaatgctgtgggtctcagtaatcagtggagtggccgcttggctgttggcttttggcgttgcccaggggaacgtactatcaggacgctcaccagagcagcagtcctacaccgagtttctcgtggtcaagattctgtggtttgaagcgctcttttgggcctttacgattgctgcgtccgtgcgccgacttctccccgagcgaattgtctcgcacccgaaacaaaccaaactctcggccgtgcagatcttttggagaatagcacggaaagtgttgccatacggcgttggagtgattcttgcgagtgttggcggagcggttgagctcaggggatcgaaagctgacctgtactggacattgagttgctgcacattcttcgtggtgtcggcggacacacacactcgccacatcttccggagcgatacactgaaaggaaaagcacgggaattgcagcggatgttgcaaattcaatgcaacactgggacgccgatgctgcctgctccacaccgttcagtatcgcgaactgacttcgttcgagtgctccggcaaacgatgcccttgctcgttgttgcgttattttccgcgagctatgtagtttcattcagattgtcactgagcggcaattagctacgtttgcagcctgcagtttcctgataaagctgctcacccaagaggtagcaaagttgtacttaagcaagcagagtagaccgccgacgatgcgttctatggtaattatcgtagcaacaccaacgatcatggtcgatactcagttgcggacggtgttgatgtgtcaggacagcgcgtcgttgaagctcgttgggtcggtcctgctggcagtgggcgaggtcgcatttagagtagcgaaaacgctgttcgtgacacgaaaggcacgccgcattctgcccaagaatcaaagtcttcgggcgtcgatgacgattcaatctcaaaacgctgctaccccccaagagggcgacgttggcggtgcgtctccaagcttagaagatgtgcttgagcctacgaagtcgtggcttttcactccgccgagacgtatgcagatatgagcgcagagtacatcgctatgggctgatcctacgcaattctcgttctctttggctcgcacccgaagttcaagctgaactgccacggagagtcaacttcacatgcattgcaagctgcaacgattctcacgcaggtgggggtcgaaatcgtggttgatttcgtggcgagtgtactcgaaatccgacgtggagtgagctttgaccgcatcaatgcggatagtgcctacctcgcgttcttctcggcggttgtcgcggttgccaatatccacatctccgctatctacctaaatcctactacaaagtgatgagagctgttgatataaatttcacaaaaaatgcaagtggtgtcaaagtctacaacaagaaatccaaaagatttataaatttaatgcgggcacctggcttgcgcgggtgaaactcaatatagtcatgactggcatcactgcccgtgccttcgtcgcgttcagttcttgccattgagtgttgcgcttgtgttaaccttcgaatgcagagatgtttttagtacatgcagtgaagtatcgagtacagaattccaccggtttcgtatttcgggatcaagtccacgatcatttagaatcaactatcacgacttgctttgttcgtccaacgatcaagcaatgatgaatgcaaaactacagacttgtctatacaaatactcctcattattctacgtcattaaatacgcatataaacaccagaagcgatgtggatgttgacaactgcgacgaggaccatgaaaatggccaggaaggcgtcgtccttgtgtaacttctcaaaatgtacaccaaatcggatctccatcgggatggcaataacatccgcaaccacctcgatacccatttgcaccagtacagtagtgacctcaaaactgtgggttgtgctggtcgaagcgttcccccccagcagaaaccttggatttgagccgaagcagatgatgataacgtacgcacagcacatcgcgatgaattccccatgcatgtcagcgtaaacttcggcggcgtggagtgcagtgagcttctggactcgagctacgccctccagttccggcgatgacagagaccctgtactcaccaccagagattgagcgcgaagcgtttcaaccaaaccatcgtcagaattcatcttaacccgtgggagggggtacttggcctacgttttacggacccgatgccgcatcattagtccagttacaagccgcagtcccatcttggctatggcgagtaaaacggagccggccagcgtcaaagatttactgtccagacacaaaatcactgttcgtagctgggtgtcgaccaaaattgtgggagctgccataatgatcgccatcgtacggagtgaaggggtccgctttcgcctccctaggtacaactttgcagccgcctggatcaagaacttgagcgtttggctgcacatggcgaacactacgagctgccacttctccctcatttcaattgagctggccacgtgcacgaaagctcctgcggatagcccagagacgaccagcgccaagttttgattaaatactcggaggaactgagtcaacgaaggagaccgacgtggagaaggtgccgctgtagtgagttgtcgcgcccgtcgactctgacgcagcgccttcgtctgcccattaacagtctctaccttaaaaatgtagcgcgtgtgagtatcggtgacggtcaggatgaagttgtagcacatcatgggccagtacacgtcggccttgagcgtgtcgtgcgtgaaatggtgcgatgcgatagcaatgccgactccgatactcatagtggtgacgataactatatggacgaacatggctcgcaccaacttgatcaagatctggacagttgacagttgagtaggcgctgagccggtagtgaacgtctcgggcagtaactttgccacacattcggcgatcgtgaagatccaggcgaagacccagaaccaaatcatcttggccgtgaggaattcgctgtgcggttgctcgatcggcgcaacggaagagaaaacattcccctggtcgatgagaaacgccagcaagcacgagatcgaagcgctgagcagcgagttgctcagtacggtgccaaggattcggatggttctccacgcgactgcagatgctttggggaatactcgctccacccacgccacatcctgctgctttgagccgtcactatccaaatctgagccgggggaaacttggtgccgtgaagcccacaccatcgcgcacgtgagatttcgctggtcctgggcggcgatgtccgcctgatgttgaagcagttctcgccagatcgccacgtttgacgcgtagccacgagcgagaacatgcagcagcgtctcctgctgattgttgcggacgcgggcgtcggctccgtgggcaagcagcagcttcacaaccgagtcgtattcattgcgcacggcgccaaacaacgccgagtcgccgtcgtcattcaccgcgttcacctcagctccgtgctgtagcaacagcccaaccactgcaagttgcgtcttctcatcgccagacgcgaaatggggcgctgcgctttggctcacgaacgctgcgtcgatcagcggcgtgtccccacgtcggcgaggcctccgatgcattccgagcgttcacatctgccccagcagcaaggaggaactctacaactggcagtgcgcagtacgccgcggccagatgcaggggcgagttgccatcagcatcgcgcgcctcaatgtccgctcctctgccaagcagccactgcactgcgtctaacgctccaaacgtggccagcacgtgcatcgaagtctgcagcgctgcgttcccattgtcgacgtcgcatccgtacgtggccagcatgtccgcagcttggaagtgtcggccgatcagcgcggtcgtcaagggtgaggccccgcagtcgtccacagcgtccaacggggctccactttccagcacaaactcgagcagctccaggtcttccgccaggacggcgaagtgcgtcacggatcgctggtgcttgtctcggaacgcagcgagttgggccgcggggaactcgcactgcaacttgaccatcccgtcgctggccgcgtgaaccagacgagcccagagcgatttgtcactcgtagacactcgggccgtcggggacccgcccataaagtcggcaaagaggtgaggatccattgtttcgctttcactttagtggagactttcgctactgagcggtccctgcttgaggttcgccatgagctcgctcgactatgcgttggacaagtgcgtgtctctggatttttactcgaacgggaacaactgactgattagtgccgcgtgcagggcaacttcagctttcgagtgaagtttaccactgcaacgacggtcgtcgccaggcgtaagcttcaaggatgactcctcgctgccgtaaacgccctggctcaccgctagcagctccttgctagcggcgccggcgtctcgggctcgatgtcgcgctcgctgtgcttggagtcggcgaaggacgtcgcgttcttggtgacgaggccggcgaacaagtcctcagtcggctcggaggctgcttggtccggttcatcgtcgtcgtcctcttcgtcgacggcgtcttcgcactcttcagctgctggacgatgtcctggcggctgtgccccagcgtcgctgctaactccactcgcttgggaactgtcgctgggcgggcgctcgatctcgggcatgcgcggcttcaaccgatacgccttgctctgcggaggctccttctcctccttctttggcttcgtcttgttctcgttctccttgccccagctctcgccgacctgccgcatgctcttcctgccggccgtttggtgttgcctccagcgtgagacggagctcgcctcactgctgctggacgatcgcccagccccgcggccggcagagcttctctcgtccttcttgtggatgacgtgtcggccgttgctgcagagatcctgcaggtccgccagcttcaacggggccttcttcagctccgtcgtcagcttcagctcgaccgcagctaccagtctgtccacgaccgtcatggagcaagtgccggcatctcgcatccagaggttgaccgccacttcctcgcagaaaagctcctcgaacgtcaagaaggcgagcgcgaagagctggaagaagccgtcgtcccgctcaaagagctgccagaagagctcgtccgtgacggggaacggccccggattcccgctcgtgtccatcaggtgcgttgtcaagctcaaggagcgtacgatggccaccgcggccttggcgaacggataaccgccccgaccgcgccgcatcatggccgtctcggccgggtacgtctcgacgaagaacacgaggcactgcagccctaactcgcccatggggttcaggtcggcggccggattcgggtccgagaagcccgcctccgtccacaggtcgctcaccagcacgaagcccggcatttggtctctgcgacggaagctcgctgtccagtatcgctgcagcagttgcaggtgctgcagtataatgcaaaggtggttagccgggtgaggtgatagttggttgttcgtgcttgaacgtgcgcacctccggagacgccacgaggcggcggaacagcgcgcgctgcatcttgaacagcacgagcatctccttgtcgttgggcctgcggccccgctcggcctggctcagttctcgtccggcggcgttccccattagcgcgtcgacgtgtgagtgcaagtatggatagaggaatgcgaccaaagatccgcggttgtgttgagttggttggcatccgtcccttcggacgagaccttccggggattagatccgctgatccgaccccttcaactacgctaaatgagagactactagagctaacggagctacgacgccgctggcctaggccatgtccttgagctcgaacgtgatgaacttcttggtctgcaggcggtccgccagcttgtggccgaaggcgctggccggcgtgtagaagccacctgggagactcgacgcgtcgccgaactcgcccttggtcaggcagaacgcgcactccgagatgaggcgcgacgtgaggcggtagcccgggtcgcccgagcccaccgtcttggccttgacggccagcttgccgtcgtccgagtagcccgcggcctcggcgatgaagtagcccttcagcatggactcctccgagggcccctggccgggggcaggcgacaaccgcttgaccagcgcgcgcgtccagctgaagtacagcattgtgctcgccacgatcgtgccgaacgtggccagaagctgcatgaacaggccgccgatggccatgcgctcgcggtacacgaacttgctgccgtacttgtcttgcaggcggtggttgctgcggtgcacgacggcctggttcacagagccgccgatgaacagcgagtgccagaagcccatgaccttgtcatagcgtacagcgacgccgctcgtgttgggcccgacgaggttggccgcctgcttctcggcacgcgtcttctcgtccgtgaggaagaacgggttgcgcgaggccaacagctgcttgctggtgcaggtctccatcatcgcgaacaccgaggccatcgtgccaccgctcgcctcgcccttgaggtccgtgaagtacaagtccacggcgctcgtggccgagttcaacttgctctggatgcggtcggccaccaggaacgtcgtcatgtccgacgggatgctctcgaagccgcagcagttcaccagcacggcgcccgacttggccgccgcggccgcgtacttgcgcgtcatctcctcgatccacacgatctcgcccgtcaggtcgcagtagtgcacgccgtgctcggcgcacgccttgaccagcagctcgccgtagagcttgtagggccccacgagcgacaccaccaccttggtctgctgcaccatctgcaccagcgactgctcgtcgccgctgtccgccaccacagtgggcagcgcgtccagcagctcggacgccacctcggggagcttggccttgagctgctccttcagctgctgcagcttggcctcgttgcgagctgccaccgcccacttgagcgccgacgcgctgcccagcgccgactccggctcggccgccaggtagcgcgccaccagcgagcccgtgaagcccgtggccccgtacacgatcacgtcaaagcgcttgctcatgctcggaaggaactcgaatgacgcacgatgccaatggatccctttgcctgtcaactgtaagcacacgtcatcggaagaggtttcgcccaatgggtgtgcagtattgcgaccgggttttttactccgagggtgatgggctgatgttgactcgacatttgtatgggacgtcagcggtacgacaccggtacttagatcggtttctgaagttgaagtcgaaatgtggacgttgagggtggcgatgccgaccatgaagagcgcgaggaacgtgtcgtcgcggttgaaggtctcgaagtccaagcccatggatatctccagcgagatggccacaaagtccacgacaatctcgatccccagctgcagcgcgatcgtggcaaggtagccgtcgttgatgaacgcggcggtcgcgtcgctgccgagctggaactttgcgttggagccgaagaagtagaggatgctgtacgaggaccccatggcgatgtactcggcgctcatgtcggcgtacacctcggccgtgtggagcgataacaacttttgtgccggagagctggctggcggcagagcggatgtcgatgtgagtgactctttctctaggccgtctcaatgcggctgggcgtgtgacttggcgtctgggtggctttgaggaaccacggcaacgacgttacgtgggcgtcgtgaggatgtgcgtcggagctggcgcctcacttgtagagtcttcgttactctcaaagagatctcagctgccgcaagcgctaccgagctcactagagtcgatgccacattggaatggcacagcaacgtagtccgcagttgtgtgtccaccaagatcgtcggcgctgcaacgatggcagccattgaacgcatcgacggagttgttctcagcttctgcagataccgctttgcaagctcctggacaagtatcttgagcaccaaactacaaagtccaagcaagacaaacacccacttcgttgtgatgggggcgtagttgacaaggtgcacgtaaaccgctgccagaagcgctgaagctacaaacggcagattctggacaaaggaccgcagaaactgagagcgcgagggtggacgaggtgaagacagtgatgacaatctcgcgatcgcggtcatatccttttgctgctccgcttggcgcaaacgtacaagactttgcgtacggcctctgacagtctgaaaccggaagatgtggttggtgtacgtgcccgtgagggccatgatgaacgagcagcaaaacagcgtccagtgcaagtcggccttaaatttgcgagtgaacaagcaaccccaactccaccggcaccacttaaaagcatgaccgcgagagcgtaaggaagcatcggtcgcagcagtttagagtagacccggaagactgagagagaggagtcatgtgtggtgaaagtctctggcagcagtcgaagcgccgactgggtcactgtgagaaaccaaaagaagacgtaaaaccacgtgatctggaccgcaacgaactctgcatacgactgctgttcggggctcagtccagatacagggttccccttcgagatgagaaaagcgagcagccatgacacagtggcgttcatgagtgagttgcgcagaattttactcagtgtctgcaccacattccgcgcacgcttaacagtttggcggtcttgaccgttgtctcgttgctctggctaaacgaagtctcttggtagagttgaggcattattccaatcggcgtggactaagtcggtgtcggggaacgatcacattgtcatgaccacgccttggaagcaggcagcgaacttcttgaaatagcgatccattattatgtcacgggtcttcgtgacgctgcggtagatgttctaccgtattgtacgtctcatctcaatcaatgttgcgccaccatagagacaacctccccgtaccggtaacactgcacaggtaggagaagccgtgcgtctgctcaacagcatatcaacatcataatgcatggtgctaatactcatcaaccgatatccaagtcggcccacaaccatcttgcttgtagattgtgccgattacagcacgccggccgtgcgcagcatctccgtcagcttgccggactggaacagcgcctgcacatccgtgccgccgccgatcgactccttcttgatgaacacgttggggaccgtacgccgtcctacagcaacaccagcgacaaatacagcgttgaagtcaacttcaacgagcccgaaatagttccgctacatatacatatagttggttgccttgccctaccggttgcagtagccagcgcgttctgaatatcggcgcccgtgggcacgtcgttcttcagatccagctccacgacgtggtacttgacccccgcttcgtccagcacgcccttggcctaagaattgacgcatcgaaatagcctacgttttagcacccttctctttatcttgaagctgctagatagacaacaatgcgccgccgcaccaggttgcagtacgggcagtagctcttgctgaagatcgtgacgccgtgctccgtcgtcacgcggtccacgaactccgcggccgccgcctcgttctccctggagctcgctgcccccatgctgcaacaaatgaaagtgtggtgtgcgccacatggatgtacctgatattcggtacgacccggcgggtcggcgggttcccatacaaagcgcaagtccaaactggttcgacccagcagcgctcttttcattggttggcccgacgcttctcgacggtcacaccccaagcaggcaaggcatccccgaggccgccctccagccagcagcgaccacagcagcagcagcatggacggcgacgacagggacttcctgcgcgagtggctcatccgcaacctcgagccggtgtacgctattatttatgcattgctatttatttcttgatggactcggaatatttatttaagtttactttatttttctctcttgctgctgcgaatctgattcctgcagatgcgacgccgacccggaggtgctgagcaagtatgtgctggcgctggtgcagaacgacccgcagaagccgggactgcaggacacgtgcgtgtccaagctcgaggagttcctcggtgacggtgcgtcagtcagtttgagcagaatgaggggggaacagtggaaagcaatgtatttacttatgattattgctggttatttcttcattgcagagacggcgggcttcgtggccaaactgttcaaggcgctggccgatggctcctacaaggcctcgaactcgagtcgcgccaacagcgcggcccccagtgacgagcagcagttccggtcatctaacgcatacgacgacgactactcgcggcggcgcgagcgcaccccctcagacgacgaggaggagcagcggcggtataacaagcggcgtcgcgacgacgaccgctcgagggacggcgactacaagcggcatcagggcagtccccggagagaccgacgtcagccctacccgtcgcgggatatgcgcggcggaccaatgggcggacgtggcccggcgccgtatggcatgggcggcgatcgccgtaggaatttccctccggagtggggcatgccgccgcagggaatgtggccgccgcacttcccgcccccgcgcggcggggcctacccgccagacttcgaccccaatgtgtatatgggagagaacggtggcatgatgccgcctccgcacatgatgatgccccaccccatgggcggacggggccagtactaccctcctggaggccgaggaggccgcggtggccgcggcaactacttcggaggccgaggcggcaaggacggcgagaatggagaggcgaccactgcgaagacgacgctccacgttcgacatgtggaccccaagtacgtcaacatgaccgcgctcagcctgcacttttccaagttcggcaacgtggtgaacgttcagatgcggccgagcgctaagtgtgcatttgttcagtacgcgaccgaggaggaggcgaagaaggcgttccactcgcctctgcctgtgtgcaacaaccgctttatctctgtaaaatgggcaaggcacgacgcgcagggtccggaggaagctgcagatcatcagtccgagggcgcctcgaaagaagagtctggagaggacagcgtgcctgctagcggtgaatcggctgaaaagaatgcggacggtgctagcgcagaaggagaagcacccgccgtgctgcccgagcacaatatgaccgctgaggagctgcgtgcagcagcattagagaagggccgcaaggtgctggagcagaagcgcgagttgctcgagaagcagcgcgcgctcaagaagcagaaggaggcactgatcaagcggcaactggcccagcagaaggagctgctggagcgcatgagcaccaacagctcccagttctccgtagcggagaagcgcgacctgctgaacaagatcacagcgttgtctgcagagctcaaggcgctgaccccgcgccactcggccatctcgccgactgcggcgacgcggccagcggaggaaggcgagggcggcgagaacctgaacggactcaaggcggagctcagcgcgttggaggccgaggcatccggcggtcgaggaggtcgcggtggccggtggtctgctggtcgcggctacagaggaggccgtggcggccgtggacgcggaggcttcggccgcggctcgcacacgctggacaaccgcaccacgatcgtgaaggtggcgaacctgccggaggaggcgcgcgacccgattgtgctgactcagcactttggcaactttggctccgtcgagcgcgtcgtgatggacgaggccgcgcccggccagggcttcatcaagttccaggaccgctacgccggccaggcagcgctgaaccacggcaccatgttcggcgacaagcagttggagatggggtgggtggagtcccaggaggcgcccgcggagctaacacggagtgactcaccgacaacagcagcagcgtctgctggcgcggaagctggcgacggcaatgtggcggcggcatcaagcgaccaggtacgatttgctctttggcgtgatcaggacacggcgacccacaccgcacacacacgactaacttgtatctgttgctgttgctgcctggatactttcacgcgagcaggtctccgcgagtgcgtagccggccctgcgatccgacgccatcgtcctgagtcatgactcatgacagggaaggaagctccagcagctgagcagcccacgccggacactgctagcaggtcaagtagtcggtccgagctataaagcgatgatataggaagcctgcaattggctaaaatacgcaattcaagtggaatggttgtatgttctttcctagagaggtcttgcagtgcatgttgtgtccgacagacaccacctgtggcgcagaggtgtctgcgagctgctctctgctcggagcgtcccagaaaatgtcagtgtgttgagacggagggggcggcggaaccaatgttttccaggcggcaagatggctcgggcctgctgtctgccacgactgtggggcatattacccagcaggcttgggacacaccagaggtcctaataatcacccgcgatccggtgcttcaacgcaacatatcaaacttgccgcggtcagtcgtctgcttgcaagagagtgctgtgccgcgatgtaagagctgggagctgcccacgcagtcagtcgcaggtaacgcttggctcgtttttccaggttgcagtggtcaaggtgattacgcctccagcagaacctacaaattcaggagccagtcgattacgcggtcctgcaaaatcctggccaaccctggccaatccgatccttcttattgcatccacaagacgcgctgcgtcacgaaacggggcagctcgcctcattgagcagcgctggacgatcgccaaacttacttataggcaggtgcaagacgcttgcatttccgttagaagaccgtttcttttgatcttccgtggttggcctttgctcttgcagtcaagttcgaaggcgatagcagtaacttattctgaaaaatgactgcgctgaactccagtttacactagttaatgcagtcaagtctcaaccgcaggaatgattcatacgggaaagctgcagcacgtctacccggagtttgtccaacgtaagatgtgatagtacagtgacgctagttgccgccagcgacccgtgccgcacgccggaatggttcgcacgaggtctgaccactgtagcatgcgaaaattaacgcgaaagaaagcgtcagcgctgcaaacgcgggcaaaaaattccaagttgctctccattgagcttctcgacggccccaacaccgagcggccaggtataaacggtataaaagcacgatgcggtcatttcgcctcgagcgctgaggtagcggcgttcctcaacgcgcgatgagacaacccatagatgcaccggttttgtgtcgtttactttccaatctacaggcaaacctagagcgacctacaaaacctccgtctcgaaaagaccgcccgtgctcatcaactcttcccatacatcgcaactgttgagcgtcacgccatcgctgccatctttccgacacgcatcgacgattactacgccgctaaaaataccgacctcctggaatcgcggcgtcagtcgctataattcccggcccgggacacctcgctctttgcctgttaatggaccgccgcgagagcgacgccggcgccacgggcggcacgccccgcaccgcgcaggcgcagtaccaccgcctgcagtcgtcgccccaggccggcgcgcaccgcagcgagtccgccgcctacccgccggccaccgcgccctcggcgtcgccactgcgcgccaccgtcgcggacgccaccagcgcgagcgccgcggccttcaacccgtccagatacttccaccgcaaccagacggtcgaggtgctgccgcgccagcccgcggggccctcggacctgcccaagtcgcgccccaactcggagctcttccgcacgctcacgtcgtcgcagctgcttaacttccgccagcgcctgctggacgacgacgccagcgacgcgcccatgcgcgccgagttcctcacgcgccacggcacgacggcctcggcctccacgcccaatggctcggccgccgccgcgcagggctacggctacggcaacggctacttccgcagcgagagctggcgcatgttctaccgcaacctgccgcgcacgctgcgcttccgccagaacacgcgctccaccacgcgctacatcgacccggccaacgccgcgtcgctgcgctcgcgcgtgcgcgcgcgtaagcaggaggagcaggcccgcaacgaaggccgcacgggccagggctcccccatgcccgagcgggagctcaccgacttcgagcgcgagatggccaacgcccgcgggggcacgaccacggacacgagcagcgcgcagaacggaggaggctcgtcttctgctgctgccgcggccggggcgaccgtcatgacgcccaagggcagcagccacaagacgatcggccgcatgagcagcctcatgtccacggactcgcagggcgcgcccatcggccagcggaagcagtacaagatcgtcaagatcaacgacggaggcaatgcgcccaagcgcgaaccgaccggcggagaggacggagcagaggacgcggacgcagaaggagaggagttcttcgtgtccaacgaggtcaagacgtcgcagtacacgtggtggagcttcgtgcccgtgttcctgtacctgacgttccagaagacggccaacctgtacttcctgctcatcggcatcttccagatcatcccttccgtctcgccgacgaacggcgtcccgctgcagttcatccctctggccatcgtgatcgtcatcgacgccatcttcgccggctacgaagactacaagcgccacatggccgacgacctcgccaactcggccaagacgcgggtgttcaaccgccagctgcgcgagttcgaggaggtcgagtggcgcgaggtgaaggtgggcgacttcgtcaaggtcgccaaccacgagatcctgccggccgacatcatgattctggctgtgattcctgcggaaggagcgcgctccggcggcaatatgggcctctgctacgtggaaaccaagaacctcgacggcgagacgaacctcaagctgcgtgaggcgccccagcccacccggaacatgttcatgaacgaggatgaagccggctacattgtccaaggatacgtagagagcgagcttccgaacggcgacatcaacacgtactcgggctcgctctacctggaggagaacccgaacgggggcagcaatgaagggatccccctgtcgctgaagaacatgctgctgcgcggcagcaagctccgcaacaccagctacgtgtacggcttggtggtaaacacgggcatcgactccaagattatgatgagctcaggcgatgagttcccggtcaaggtctcgtctatcgatgagatgaccaacagacaggtgatcgttgtggttgttattctggtggtgatgtcgcttatcggcgcgatcggagacagagtgtggatgaacggccttcatgttccaacgtacttggaattgaccagctgggacgacagcttcatggagactttcgtgtacttcttcgcgacgctggcttcgatggtgcccattacgctgtacgtgtccattacactcgtgaaggcgttgcaaggctacttcatggagcgtgatctggacatgtacgacgaagagactgccactccgatgagcgtccgcaacatgcagctgaacgagcagctgggccagatttcccacattttctccgacaagacgggcactctgacctgcaacaagatggagttccgcaagtgcagtattggtggtcgcagttacggcaagggcacgaccgctattggtatcgcagctcggatgcggagcgatttcaagggtgaccggaccgtggatgaagacaccgcagacgagaatgatgtctctctcttggatccacgcatggaggccccagctcctaacgtgaatttcaaggataaaaacttctggcgggatatgcagaacaaggaagacacccagagcgggaagatcgaagagtttatgaccttgttggcgttgtgccacggtgttttgattgagcgtctggacccgacggaagaagatgccagccctccagttcactactcggcctcctctcctgacgagcttgcgctggtctgcggtgccaagtacttcggctacgaattcatcgaccgccaacctggaagtgtttcgatcaagaagcctgatggagtcgtggaccagtacgacattctggaagttttcgagttcgactcgaaccgtaagcgtatgtctgtgatcgtgcagcgtcggaagcgtgatgatgaactccgtctcatgtcggaaagcgaggaagatgacgtgcttcttcttaccaagggcgctgatagcatgctgttccctcgtcttgctccgatgtcggccaacaacgaccggatccgcgaatcaacagagaagcacctagagtccttcgcacaagatggacttcgaacgctggttgtttgcgcgaagaaaatcagtcctcagtcttgggagcaattctacgcccagtatcgccacgtgtctgctgacctgagccaagtcgaggcgaagtccaagggagagccgaatgccatcgatgctctgcaggatgagatggaatcgaacctggagttgctcggtgccactgctatcgaagaccgactgcaagacggtgtgcctgaaacgatggagagtctagccaaggctggaatctgcatctgggtgctgacgggagacatggaggaaacggcaatcaacatcggatatgcttgccgcttgctcaacaacgacatggaacgacacgtgattaatgcggcgaagtaccgaacgaagggcgccattctgcgcaagctggacgagattttccacgagattcacgacgctagtgacgatgcttctcgtacgtcaacggtggctgcccattccgtcttgtctccgccatcaggccaagttgagcacgctctggtgattgacggagcttcactgagcaagattctcgaggacccgctgcacaacttgcatctgctgcgtgtgtcgctgctgtgcaaggtcgtcgtggcttgccgtgtgtcgcctcagcagaaggcacagctggtcgagctggtgaagttgaatgtgccggaatcgcacactctttccattggtgacggagctaacgacgtcccgatgattcagagtgcacacattggtgtcggtatcagcgggcaggagggtctgcaagccgtgaacagctcggactacgcattgggccagttccgcttcctgagcaacttgattttggtccacggtcgctggaactacaaccgcgttgcagctctggtcgtctacacgttctacaagaacatcgcgtacaacgtgtccatgttctggcacacgctgtggcctaccgggtattccggtacgatgatttactccgcgctgatccagcagggctacaatctgttcttcactgcgctcccgatcgtcgtgttctcggcgtatgacaaggatttaccgaagaagacggtgctcgagttcccgacgctttatcacgccgaggtgcgcaagaccagctttttcagtcacatcatgttctggaagtggattttcctgggcattatcgattccgtgggtatttactttgcgattgtggccattgggtggaacatcgagcgtggtggcaacaccctcgagttcctgtcgatgcagactcttggctggaccattctgtgcatcgttgtgaacgcgcgcttctgcttgatggtgaactcgtgggacgttcttgaaatcggaagtatggcgctcactgtcatcgcgctgtacttattccagtacgtgctcgaccagatcgactggtcgtacgacacggattcgctgccgtggcagtttggacgctcccagttctggcttggccagttgttcgctgtggttgccatcctcatgaaggacttcttctacgagggatgccgacgccgctttgttccggagtatctggatctggtgaaggagtcgcaggacgagaagtcggccatctcgcgtgaagagctggccgagttcaagcccccgcaggtcaactacctgaacccggagctcgccggcatgatcgactaccaggatcgtcgcgtccacgagagcgcgcccgtgaggttcacggcctcgggccgctcgaagctgtacacgggtttcgcgttcgaccagccggccaacgtcgtgaactggatcctgaccggcaccaacaactcgggcggccagaacagcaggaagagcatcaacgccgacgtgcgcaacctcatcctgagctcggacgaccccgttttcttcgagaaccagcgctaccagccgttctgcggctacggcagctcgttcccgggctacctgctgccgacggaccgcaagcgctggagtgatcgctcgggcaagatcagcgcgcaggccatcccgctcgccggtctggagctcagcctggacgtgccagggtgcgacgccgagggctgggtgtacgagaacgacttcgccttcttcccgtcgacgcctccgaacgaaaacgacgaggaggaggaggacgtggagctggcgctgagcacgggcgaccgcagcagcaacggcacgttcctgtcgtccaggcggaagaacaagaagaagaaggccaagaagccgcgcccgcaccacggattcgtgcgccgccgcgagtggaagctctcggaggagttcaaggcccagcaggaggctcggcgcgcctccaacctcagcaccatttcggcggtgcaggttgaagattgcaggcagtcaacgctctccaactgatgaccagacgtcaaatactaccggccgggggtattgccaagagctcacacatataataaaacaacagattttggcatgtacacttgtctgtttagtatctacccagcctctacggtacacgcaccacgttgaacacgtaaaggagcagttggcagacgttgaagtgaagatccaaagaaaagggggggtgtttgtatgtacagggtgagcttgtttgtggtgattattggcgacactagagccgcttctcatgggcgcgtagattactcgacgaacttcttgaaggcttcgtgctcggccagcgcggcgtcgttgacgatggcgttgagcacgagcgccagctgcgtctcgcgctccgcgatgagcgccgggttgtgcttaccgcgcagcttggagccgaggcccgagccgggcagcgccggcagagtcttggggctgccgagcgccaccacgagcttcttgaagtcgctgaagcgcttcttgaaggtggcgtcgccctccacggcctccacagtgtagaagaccacgccggcctcgtcgatctcgtggcccgtgaccttgaacagctccttggcgggtgtctctggggccgcaggctcttcggcggcctccgcttcaggctcggccccagcgggcgcagcctcctcggtctcagcagcagctgcaggctcctcggccttgggctcctcgacggcgaccggctccgcctcggccggggcagcggcctcggcctccggcggattcgtggcgacgacgtcctcagtcttggattgcgcgcagcccatcgcgttcggttgatagataggactgagcagaaggaggaagccttgaagcgacttgtgcagatcgaggcgagatcgatagtgagcgagcgagtgagcgggctggggaagcagtgaggaagccccacgaagcgtctgggagagaaggcgagaggagcgccggcagctggacgtgcctatactgaccgagaagcatgctgggcagatcgggcatctcgccgagatgttacacaccagcgcgagcctgcggctgacgcggggccgcgccaaagatacgagcggcgtaagtcgcttttgccgcgcgttcgtgggtggcgccacaatcaacaacaaccgaaccggcggcgccgacggcaaaggcaggcaacgccgcgatgccagcgagaacatggcgatcgtccgcccgcaattggctaagaccgaaaagcgacttacgcgcgttatgtcgctgcggcagagaaggagccagctgctcgacgttactatcgccgcgatgtggtcactgctgccagggaggaactgatatcggcccaaccctaccgtctgtttgacggtcgttaaagtcgggtgcaggtagacgcgtttcgaaccaggtccatcatttctcggctaagtgcgagaagcatctttgcgccggctctcacgttgaagctgccgttcccaccgacatggctacagggcactccatgcttgctccatgcttttgtttgatggtaggtatggaaaagtgacgagtaagcacgcgctccgaattgtgagctggtcacttcacagcgaagaagatggcagccgaagatcttcaaaggattgcgctcttgtaccgctgtgaactgagtcttgtgttggacggcggcggggagactttcaattgcttgcactgaggcacaacctagggcagaaacaagctttcccctgttcctggcttcagtagtgcagtgaaatgcatctatatgtattgctgcctacacacacgttccctggtgtcacgacccgctcacttgttgacgcttcttcacccgctccagcaaagagcccagcctcgactgcaactgcgcctcgtcgtcgttatcgctgttttcatcgagcacggcagctccagtacttgatggcgtgtctggaggctggtaaaacgaatcttgccttattgcagtcggctccgatagcactgcaggcctgaacgctgttgcctggaacttgtcgaacgccgacggcgtggtggcccgcgacttcttcggacttgcgcagaggacgtcaccaactgcatattcacgacccacagtgctggagaatgacgcgccactcgatttgtggtacgtctccgtagcaatgaagagaaactcgttggcatccaccagccgcgacggagtgctcgccctcacgacgctcgagtcgcaacttaaaaaggccttcatcgcgtgcatgaactgggaacagcaacaagatcagttttaactactacataggtctgggatcgctgtacgtgcctcaatgtacgtatcctctgccttggatccaaacacggtttctgcgagagtctcggcttgtgtccttgaaagccacaccagaagatttggggtcgaagttgccggctttcgcttccgttcggacgctgaagaagttttgacagacatcgggcgatacgcgggagcgcagaccaagcgctgcagactggagcgtgcaaacagaaagaaggagagcgtgcgctcagggtatttgccctgcaagaagcaagagaatagctccacgtcgactcgctgctcggagagttaaaggttagcgaggttgtcgtgaacgaaagctcaataatagggagaagcttacgtgctggagagcgttgagtccttcgatgagatcccatgcctgctggtccaccaaacgcttgaggccgaagcgattcgtgagatagtgccgaatgaacttggcgaactgcagtggacaccaacgcatgaatgaacactagagccacacacagcacccgcaccacacgtacactgccgcaactgttcatgcacgacgcggacagatcttcataccgagcgtcgtacacttcgttgatgaagcgcaccagcctgatctccttgacgtacgtgcctgggtcagcgacagatcttgctggcctctctccgatctgcatgcagcaatctcattgtcagtaccctgctaccccttacagcgtccgcaagggccagcgtcctaccaggaagatgaggttcgcgtacgcacgaagggcctcgggcactgctgccaggcgcttgtcgactggatctgtgtcctcatcttcctcctcgtccaagacctggttgccgggatccttgtctccgtttgaatcggtcagtggtggcctcactaggcggatgttcgccacgaagcgattgtccgaagagcgctggtggaactttggaccagacacaacgcagcggtgagcgcaccgagggcagccgacaatatgtaaaacgggctgcataccttcacgtcgttctcgatcaggaagcgcgtgtactgcaccttcgccctcgggctcaggtcggcgaacacgaccacgtgcggcgtcacggcggcggcctcggccattgcgcaggacacttcaggtgcttacgacctttcaaggtccaataccggtatcgtaccggtgataattcactgaaagtttcatatctatctttcaaatctgtcggcatccaaacgtagagattaccaggttagctcattgcacataaaacaccgaagatttaggtaccagtctaccattttcgagcctattcaaattgctgagtgcagaatatgctgaccgagtctaaaacctgtatactccttctctttcagatgctgtagggtggatagatagatggtcatggtgtgagagcattgccttggcccctgtgggtttacttttttaagataaaagaggcgacccattttctagaaaaagggctccgatggtgtcccgtttcagcgcgcgagaaaccaggaaaccgggcagattgtgcgactgcaccgcgcaaacgcaatgtgtttgcaaccggcatgtgtctgcttacgctaattctggtggcggtggcgctctcgggcagaggacaccgagcaccaaccaagatgctctgtatcaattcagatttctagatcgcgagggccacagcatttattagtatcctgtgaatcgcggtaacttcaacgtccgccgaccgcgctcacattcaagtctccatgacagcggatgtactgtagttgtcgccttcaaacctggttggagacaaccgacttgctggtgcttgggttacttggccatagtcccgagccgcattcaactgttaaattaccggtataccgaaaatgtcattgtgactaaatgtcctccgtccaatcagcgatcgctaatttaggccgacgcaagttacgtcacttccatctggtgccacaagagcattccggtgctctaagtacggtttcagataatgtcgctaaacccagtacgtttccacaccttctgtatggtatagacttcaagtccgtatcacatgctgtccgaaagccgcgggaaggctctaaatgctaagctttttcttgtggaatggagcccggctctaaccgcagcactccttatcagaagccggtcgtctaaacagcctcacttcagccccgaccgccacctctgcgtggccaccacttccacatcgacggtctccatcgcaggcagatccctcccccctccccccatagacactaaagccatgtgcggaatcgtcgcgatcctgcgctccatgatgcccgaggcggagctgcgccaggccgcgctggctgccggcaagaagatccagcaccgcggcccggactggaacggcgtgcgcgtgttcccggagcgcggcatcgccatcgagcacgagcgcctggccatcatcgacccggagtcgggcgcgcagccgctggtgagcaacgacccggagcgcaacatcacgtgcagcgtgaacggcgagatctacaactaccgcgagctggcgcagacgctcaagacgccgtaccagttcatgaccaagtcggactgcgagatcatcatcccgctctacctcgagcacggcccggacttcgtgcacctgctgcgcggcatgttcagcttcgtactgtacgaccaccgcaaggacttcttcctcgcggcccgcgaccacatgggcatcacccccatgtactacggctacggcgcggacggcagcgtctggttcgcctcggagatgaaggcgctcgaggacggctgcgtgcgcttcgaggtcttcccgcccggccacgtgttcacgagcgacacggagacgtgcaagccctggtacacgcccgagtggtacgcgcccggccacctgggcaagacgccgctggacctgccggcgctgcgcgaggccttcgaggcggccgtcaagcgccgcatgatggccgacgtgccctggggcgtgctgctctcgggcggcctggactcgtccctcgtggcctccatcgccgtgcgcgagaagaagaagctcgtggcgcagggcggcgagtggatcaacaagatccactcgttcaccattggcctcgagaactcgcccgacctcaaggccgcccaggaggtggccgacttcctcggcacgatccaccactcgtacacgtacacgatccaggagggcctggacgccgtgtccgaggtcatcaagcacctggagacgtacgacgtgaccacgatccgcgcctcgacgcccatgttcctcatgtcccgcaagatcaaggccatgggcatcaagatggtgctgtccggcgagggcgccgacgaggtcttcggcggctacctgtacttccacaaggccccgagcgccgaggccttccacaaggagacggtggccaagctgcaggccctgcaccagtacgactgcctgcgcgccaacaaggccacgagcgcctggggcctcgaggcccgcgtgccgttcctggacgccgacttcctggacgtggccatgaacatcgacacgcgcgagaagatgatcgacgccaaggccaagaagttcgagaagtacatcatccgcaaggccttcgacgacaaggaggacccgtacctgcccgagcacatcctgtggcgccagaaggagcagttctcggacggcgtcggctacggctggatcgactcgctcaaggacctggccgagaagacggtcacggagcgccagatgaagcacgccgagcggctattcccgtacaacacgccgcagtccaaggaggcctacatgtaccgcagcatcttccagcaccacttccaccgcgaggtggccgcgcagaccgtgcccggcggccccagcattgcttgcagcacccccgccgctatcgagtgggacgccgccttcaagaacgccgccgacccgtccggccgcgcaatcgctggcgtgcacgtggacgcctacgccgagtaagtccatcgtttagatagtcgctgcgctcgtcgccgctaactgcatgaaacaatcatacaagactttgaacaactcttcaacgcgcgcgagctagcttggcacattacttgtatcgccccgatctcacgtgaggaaacggccgacagcgtgtgcagtgtgcatgctcccatgtaacggaggcgatgataccattataggcctgtcgtgtcgtccaaggaacctgcgggtgtgtgcactaaccagcacagttcgttgctccgtgcttgtagtgtgcagtagtaatgagctccattctcccgcgactccaagacggacgagccaaaagtcccacgcttggactgctgccgcctttagtgaatgacgctgctgcttcggccagcaacaaccagcgcagtcgcctcaagcagccgcatcagcgaagtctgccgccaaaggcttcatcttcgtcggccaccgtcaagtttccagccttggggaagccccagcagctcagcactctacctcgatgcaaccaggaggaggacgaccatggccgtatgacggagcgtgataataaccacgaggaagaggacgacgacaaacgccacggattgtccagtagcaggacgtccgcctcctctcggtcgtctttgaaccacgcgcacgacgtcaaggacaagaaccgagatttcatcaaggagttggaggagaagaagcgcaaggagaaggaggaacgagctcgacaggagcgacgaaagaagaagctccacgagaagatgacgcgcaagatcttgcaggacgccgacgctcgacagcaaaagcaagcagcttcttcgtccccggaggtggatgacctcaccagtgaactactgcgtcaagaggagccccaggaggacgaagaggtcgatcctgctgtgatcgagaagcggaaggagaaggccaagagacaaaagcgtttgctcaagaagcagcaggcgcatctggcccgcatccaagccaagcagcgcgaggagcaggagcagctcgagctggagagggagcgcgagcagcgcaagcgtgaaaaggtcactcagacggttctccacaagctccaagacgccatcaacagggaacaagtcgaagaagatgacgcggatgaagctcctcttccgactgtggtggaggagcaggagaacgcctcgcaggacactgaacgcagctcaaacaaccaggttctagtcgacgagcaattggaggaggagcacaagcagcgcgcgaaggagcagcgagacgccttccagcgcaagcagcagaagtatctgcagaagttggccgaccaacgcaagcagaagcagaaggaggaggacgaggcgcgcgtgttgcaggagaagcggaagcggaggatccagaaggaggctcagcaacgactacaagaagctgcagccagacaacaagcactaactgaagcgagggagaaagaggaggctgctgcggccgctgctgcagccgagaaagcagcaaatgcaggcccacccgtcgacgtggaagctatgatagctcgactgagcaaactcaaggaccgagacgcgcaaattatccccgaagcgcgagactttgcgtcctggaagaagcggcacggcgtcgcaccggatcaaaaggtcttctgcatgacgggatggtacccggtcatccgagaggagctggagaagcgcgggtggttctacaaccaggagcgggtgtcgccgtacttcgacttcaagtggtccctcaagagcgacgagctgcgggcgttcaagctcgagaagtaccagtacgtcaaccacttcgctcagaacgcggccatcacgaccaaggtcgggctcatccacaacttgcgcagtgccgtgtggcaccagagcgtggacatcgacgccatgtttcctcgcgcgtacgatctgaacgacctcatggacatggacaactttgtccaggacttccgctatggcgtagccgagggacttctcaagcagctagcgagacgagggctgcagctcaagcagaagctgccagggacagcttcgatgggcgccaacgaggctctggtcgacgttgtgctggccattgcgaggaagaaggtcaagagcaagcggccggagagcaacaacgtcgagtctgtcggtggtgcgcttgatccactggaagaaagtgtcgacgatccattgtcgacgggcgtgaacgaactcgtgaccgacctgcagtgggaagtgctaacgaactgctcgctggacaaaccggggcgtctccgcgcgtcgttggtgtacaagaagaaagtgtacgcagaagataaagacgtcactgctggagttgacggcaaaagccccgacacggtgctgtcggctcgagagaagcgaatgcagcggcatgcggagaagctgcaggccgacgcgttcaaccgggagaaggctcgactgagcaacctcattgctcacgtgtcgctagtgcgtgaagaagtcttcgaagaggctattcgactcgctcgagagctcgagaagttgtgcgcgcagtttcacatcaatggcggcgcggagttcttgttgaatgatgagcacccggccgcagccacgagtacgagtcagaacgtgtggatcgtcaagcccgcagggatgtcccgaggccgcggtatccgcgtgttcaacgacctggatcaattactcgagtacgtcgacgtggagaaccacaaggagtgtcagtgggtggcgcagaagtacatcgagaacccgctgctgctctgcaagcgcaagttcgacatccgccagtgggtcctggtcacgggctgggacccgctcacggtctggttcaacgaggactgctacctgcgcttctcgtccgaggagtactcgatggacgacctgagcgaccagtacgtgcacctgaccaacaactcgatccagaagtacagcgacaagtttaacgacgtgtacgccacggacgacggcgagatgcaggtagagggcaacatgtggcactcggacgacttcaagaagttcctgacctgcaagctgggccagcccgacgtctgggagcagcgcatgcacccgcgcatgaaggagatcgtggtgcagtcgctgcagtgcgtgcaggaccaggtgcagcaccgcagcaacagctgcgagctctacggctacgacttcatggtgagcgaggacctgacgccgtggctcatcgaggtcaacagctcgccggcttgcgactacagcacgcccatcgcccagcgctacgtagagtcggggctctcgggcatcatcaaggtggtggtggaccaccgcgagtacgaacagagaaagcggagcggcggcggtggtgcgagtgcgatagatgagcccgacacgggctgctggcggcggatccacaaggccgagtacgtcggcaagcccatgtcgtcctacgccgtggacttccaggtgaagggcgccaaggtgcagcgcagccgacgcagcgccaagctgcacgcctccaagaccaaggcgatggtggccagcagcagcacgagcagcgtggcgtccgtgccgacgtcgacagactctgaggcgggcggacgggcgagtccgctcgcggatagcgacggagacgatgctgacgctgacgttgtgccgaacgcacacgatgaggaggagcgttcggatgcggccatggaggacggcgctgatgaccaccaggatagggccagcatcgacaacaccaacggtaacgccagcgagctgccagaagaggacgatgcagttgaagaagcaggagaaggccggatcggcgcggaggacgacctggtgacaggggggacgccggaggacgcaattgacccgttattgtaggatagtggctgcttgcaccgggccagcctgtattcttttttatgagtaagagatcttgagatgtgcttagagctacagctggtgatttgacgttcaacactccaaaatcggtgaaggaactccgaaaaggacgagaaggaggcaagcggacgtcggcaggtgcgaggccgtcgaaatgcaagcccctgctagctaggagagggtgtgcgtgtgtgctaagatcatggtatcatttgcgtgttagctggggggaggggggagttgtgcgcacagggccaacacaagcacgcggtatttgcggaggggggccctgcaccgagctttccagcgcctcgtgcagtactcggctcgctagactgcttggcgcgggggcgtccagccaagcgcagcccggcaggcaacatgttgtggtaacaagtagttggaactaaacattaaagtagatccagcgtgtgttgcttagcgcctcgaagcacttttgtcagtactgtagctacttcagactacacgcaatggtacagtaacatacagaatacagcatttagtgcagctcagccgcttgctctcgaaccgaagtgatatgtagtgttactgtgaggacacttagacccaaggacttggcgatcaagtcctccaactcggtggccaaattgaccagacttggccacttggcccatgctcgtgctggtgctcgctcggtcggttggttgctggcagcaacttgctgccaacttggttggaacgtccaaccaacatacggaactgttctcgacaaaaaacagagtgtcagcctattcttttaccgtgcaccgggccagtcggtgtggcccggtgcaccacgctgcaccgactggagctgacccggtgcaagtatcctctgtcttattgtagacagactcgcagagacggggcgcattaatcaatcgtgacgtcgtcgaattgcgatcttccctcgacctggtcgactttgtggccggccagccgtgcttgtgtttacgaaggccttcagagacgggagggtttccgatgttgtggccgagcgacgcgagtgatttgcaggtggccgagccttccgtttcttggggtcgcgcgaggcgcccattgcttgatgcaggcgcaccgattctactgccgggtgcgccgcggaattgagatggcttctgcagttcagagtgatccctcgcctcgcctgcctcaatgcctactcggtgcccgctctctctgtgcgtgcggttctgaccgggggcgcgcagctgattgcagagcgaggggatcgccggctcgtcgcccgctgactgtaggtcgggggcaagttgcagccggagagcgcggcagggtctctggccgcgccaatccatcaccggtgccgaaagccgagccatcccggtcattactgcggccacagcctttccgactggcgttggctctcttgtgcgacagttcccgccgcgcagaggagcacgcacgtacgggtgccgcagtccaagccgaaagctctgcacgttggcatttcgttgaggggcacgcgcaccaccgcaccgtactgtacccaaacagtaagagacacccggcgctcgtattgcacgcgcagattgcactcagcgaccagcgttgcgccaactgccatcgtggagcctccgccagtgcagatggcgatggccagcggttgagctcttggcctgcagtcactgacgcccgtggcgcgatgcacagacacggctagccaagataggctctggcctcgatacgtttaggttaacctctcggagccgatacagtagactcatcttgacgggccggcgaatccgcgcgcgccaaactgcttcagaaacctccactacctgctgatacctgcgctactcaatatatacttttgttgagtctcacgtagaagtacagtaatctgcccgagtaaggaacgcctgatatataaagacgcagaatatacaaattgatgttaagttgagtatacttttccaatgtactgatttagatatttcaaaatgaactgaagagcagctttacctacgagtccggaatgattcgaacagtggcgtatggtcgaagcactaacctttgaccaggcatcctcgcaccacaacagcgctgtcaactggtcaacctcgtagggattatctagcccttcaccttgtcgaggatgcccactttctcagaccaagtgagacggagacgcttggacggtgtggacttcatgggtggagtgggggaggaggtgggcttgtggggcgaggtgcaaaagcaaaagtgcgagtctaccactacggtacatgtagtttgaagtctagtaagatcgctaaatgcgtgccatttttcaaacgagggtggagagctgatgattggcactggatttttcaccttagtacctcagtaccttgcagtaccgtgcacatccccctatcgccacatcgactggaaaataatattaaatatgtgaggctattagttgtacacccgttccttattcgggcagaattctgtacaggttaccggcgtcgccacatcgaggagccggttttcgaccaatcacacgccgcctaaatgtgcatagaaagagcccgtagaggtcccggcccgaccgagccagtccacgtccgcctgactgacttcccctcatatctccacctgccaggcagagcgtctcggttgggtccgcgcatttgccgtcgccgactccgcgtgccgcttccacgggtcctcggaaccccgcgagcgtctgtctctgtagctgagctccccgcgcgtcgaacgcagtgccgcgcgcgctttccagacccgtagtcgccgcgcaatccctctttgaagcaaaatgcacgccgtgctccggacactggcggcctgcgcgctgctgctgctgactgcgcgcagtgaagccgcctcgtgcgacaccgccggcaccgtggtgctcatgtccggcagcgacaacacgcaggccgtcgtcgtggacgccgactgcagcgagaccgaggtggacgtgagcaagaacacgctcacggccagtagcatgggcatccagaaggtgctgagcgcgcccgacgtcaagacaatgtacgtgcgcactactcttgttatttagaggctcgggtggactgacgggaccgagtgactgactgactggtggggctgcttgtctgaactctagtgacttgtcgctgaacaacatctcctcggtggcgctgacggacctgacgacgctcaataaattgtgcgtccttgcctggctgtattgatgaggatgagatgggggagggactaatgtgttgttgccggtttgcaggacgctgacgtcgaacatcttcacgagcttcagcaagctggcgatccccgactcggtcacgaacctggacctgagctggaacgacatcgcgtcgttcgacggcatgagcctgcctgacaccatgacgcagctcttcctgggcggcaaccccatcacgtccgtcgcgggcgtgaccttcccgtcctcgctgacgctgctgtacatccacaacctgaagctgtccacgttgaagggcgcaactttcccagactccgtccagtacttgtcactggtgcagtcgggcctctccagcttgagcggcgtgagctttccggacagcctgcagtacatgtacgttcctatttgtatcatttgaatacgccggggagtgtgctaatgtcttttgtgtgccgcagtgacttctcgtacaacacgatcacgtccatgcctgacggattcccctctacggtgattcagatcaccgctacgaacaacatgatcgcagagctgtacaagtactcgttcccgtccagcgtcacgacgttgaacttctctggcaaccccatcgagtccatcaggggcgtttcgttcccgctcgcgctgtcgaagctggatctgggctccaacgagatcacgaactttgagatttcgcgctcggactactccacgttcaaggacctggacatgttcaacgcagtagtcgcccagacgagctgctccacctccggcgcggagcttgtcgccgtatccggctacagcatttgcgtcatctcggacgagctgttcgagtccacgtacggcaactcgtcgagcaagtcgtcgtcgagcgccgagagcgcgagcaccacgccgatcagcaacagcaacggcaacagcaccatcctcatcgtggtgatctgcatggccgccgtgctggccgtggctctcgcggcattcgccttccgcacgtaccgcgtgcgtcagaccaaggatgtttctggaagagacgtgggcgacaatttcttcgccaacaacacactcatggacacggcgtcgcattctggccgaggcaaccatcccagcaacccgagcaaccagcagaactcggcctcttacaacacgatcttcagcggtggcaagatcaccatgatgggcgggacggccatcgagtcggccctcgtcaagtaccgcgtccccgcgaacgaggtgcagatcgagcggtctattgccaagggcggcttcggcattgtgttcctcgcgacgtaccagagccgccccgttgtggtcaagaagatcctcccggagaaggctgcggacgatcgctgtctgagcgcgttcatcgaggagatcaagctcatctcgtcgctctcgcacgccaagatcgtgcgcttcatcggtgtgagctggagcatgctctcggacatggccgtgctgatggagtacatgcccaacggcgacctggacatgctgctgaagcagcagcacgagcggcaagagatgtacccgaaggagttcgactggtaccagaactcgtccgtgctgccggccaaggcggccatcgctctggacgtgctggaggccattgtgtacctgcactcgttcccgtcgccgatcatccaccgcgacctcaagtcgaagaacgtgctcctgagcgcctcgtacgaggccaagctgagcgacttcggtgtaagtcgcgagtggcaggtggacacgacgatgactgcgggtatcggtacgatggcgtggatcgcgcccgaagtgctgcgcggcgagcggtacacggagatggccgacatctactcgttcggcgtgatcctgtcggagctggccacgtgcatcaagccgttcgaaggcgtgacgaacgcgctgatcgtcctcaaggtcacgagcgaagagaagcccgacctgggaaccaactgccccgaggacatccgcgagctggccgaccgctgcttaagcttcaaccccaacgaccgcccgagcgccagcgtggcacactacgagctgcgcacgctgctcaagctgcactcggcgttcgagctctaggagtagttggccccgtatcttatatgaaagtagcaagttccaagacggaagcgcgaggagggaggcgagcagagcgagagaaagcggcgacgaggttccagcatcagcatgagcgcacgcgccgcacccactttcctgggtagtgtcattagtaaatctgttaaaaaagcgtgcgtttgatctctttactacaactggttcagctacagaaactaaatcttctcgagttctacatgtacaaacacgtaactgggtggggcgattgcatgaatcgcaagcccatcaacatgctcgatcgatgaaatgggttccaatgctcaactcgaggagcttttgtgctcgactgctctatcggacaggagtgctacgtgaatctgcccgctgtgcactatggaacacatcagtttagttgagatacccttctgtagtcattcggaggatgaacacagcctccgagagaagaaccgcagctgcaccaagcgcaccactatctcgcatgccatcattgcttgccgctgccatcgttatcggcgctcatgcgggcagtgctcgagttgggcgaaggctgccgaaagcgtcatggaatggtacagcgaaatgctacctgaaactcagtcgacccacaaaccaaggtaatccagcaataatttagtggaaaagttggaaggtgaagacgatattttattcacgaccatgagcccttgagctcgattctagcatcgacgttcgcgattgcacggttacaggctccaccaacactatcatttactctaatttgtcggaggaagctgcaacactcgtacactcttgaacatctcgaacgaattcacgcgtggattcaaagtgcgcagcacaccgtcatgtgctacgggtttgtgatccgacgcaccacgagagactcccgatgcaacgaagcgctgtctgcaatgatggcagcgcttggtcggtctgggaaaatctccgtgaatgcgctgaccccatgaagggtggctaggcctctgaccagcccccacccgaattcagagggtcccgcggaatcgtcgactacagcagtttacacgtttactgcgccgcctcctgaggagggacgtacgattgcagcgcctgcgagagatccttgatgagatccttggcgtcctcgacgccgatggacagacgcaccaggtcctccgggaacgagcgcgccttgcgcacctcctcggggatgctggcgtgcgacatggcgccgggcagcgagatgagcgagttgacgctgccgaagctcaccgtgatcttgaagagcttggtcaccgtcagcaggtgctgcgagaaggcgagcgagccggtgcggaagcagacgacggagccgcagccgcgggcctgcgagtcgtggatctggcggtcgggcgagctctcggggagcagactggtgtagtgcaccttctggatgagcgggtggtcgttgaggaagttggcgaccttggcggcgttcttctgggccgccagcacgcgcagactcatggtcttgacgccgcgcaacagcagccagcagtcgaacggcgcgaggcccgtgccctcggcgttctggtagaagtagatgtcacggcaaagctccgggtccttggcgatgacgataccagacatggtgtcactgtgtccacagatgaacttggtggcagagtgcaccacgatgtcggctccgagcttgagcgggttctgcaggatggggctcatcatcgtgttgtccacggatagcagggcgccgacggtgtgcgccgcctcagcgaggcgcttgatgtcgcagatgcgctgcatagggttggtgggggactccatcatgaccagcttggtcttgtccgagagtgccgccagcaggttcttagggccgtccgggcccgagagatcgacgtacttgacgacgacgccgttcttggtcgccaccttgctgagcaggcggtaggtgccgccgtacgagtcgtcagagagcacgatctcgtcgccggcgtgcgccaggcgagagacggctgacagcgcggccatgccactggtgaaggcaaaggcacggtgtccgccctcgagctcggccatctgacgctcgagcgccgcgcgcgtggggttgcccgagcgcgtgtagtcgtaggcgccgaaggtggtgcccgagggctgtgcgaaggtggacgtctggtagatgggcatggtggccgatccgtgcgggtcgtccttgcaggcctcgaagctcacgaggcgcgtgctcatgttgaactcgtcgtcgccctcctccagcgtgttgcggttgacgtcctcaatctccagcgcctcgttgccgtccaggttggcgcgtgcgcgcttgggcgtggcctccacctcgtggcgcggcacgaagatcttctcgggctcggcctggcccgagccggacacgagctgcgtcacgtagctgcgctccagcatgaactcgaggcgcgaggccagcgagggtgcggcggcgtcttctgacggcggcgcgccctgctggttggcggccacgggcgacgcggcacggggggagcccgtggcctcggcctgctcgcgctcggagcgcagcgtgcgctcggcctcgaagaactggcgcgtgcgcaggtagtcgcacacgaggtcgaacacctcggactcgccgaggctctgctgcagcgctgcggaggaggacgccatggggctgtgctgtgtgtgccgggggaagaggggacggttgtgctccttgtgagctcttggacgccaattccggaatggacgtaaatttaaccgaaaagaaaggcagagcaccggttaaaaccggtgtgctgagaagtgggtggccagacgtgctgaattggtttgtacggggcatttgaaaatacaggtcaaactcaactgtattatgagaggtctaatagttgtgtggaccacaccatgggattatacagggaaggctaacttttaccacctgccactttgttttgcgggcgtgcatgagtgtttcccgacgcaggcgtgtcagtgcacagcataagttggtgctgtagtgaggctagttccgcagcagcataatagctggcggaaatgacggccaagccgcgcgagagctgcgcgcagcagtcctggcggccaaggcgcggtgcttggtttgcctgccaggagatttttccgggcaccgaaacggccgctccgcatcttgcgagcagctggtatggaaccggcttgagcaattagaacctgttttacttatttagtaccggtgtatttgtgttttgcacgcaaaattaggtgccacaccttaatcgaggtggtccacaaaagtgtccaccccatcgccaagatgaccccaccatggcgaaagcagtctttgtcaacgacaactggtcggtgacaagaattgagcaaactgaattgatgggacgtctcaaatgaccgctcctccaaaatggatgtgtacgtactgtaatccgggggcaaaccgctgcataacgaccgtcgtcgtcggcagtgccgcccgtgacgtgtcagcggtccactggagccatcaccttgccgatttgcagctgatcccttcaactcgacgagccgacgagcaccgccccgcgcgtccatcgaagatcaaagtggtgcctgcaccggtgctggtgcgccgcggcgatctgagacactggcaccgtcgtcttcttgccggtggcgaagctcgctgctgctgcttgcccgttgagccaggatgcgccaccacaatcgactaacgagccgctgtttcgatccgttcgttcactgccgctcaacaccttgaagcgccaacgcaaatgccagcaccgtggcgctggcagcaaccgcacgcgcccgggactcgtacaaggcacgagccctggggccagatagttggctgctgggataggacatggccttggctggcggggcagggcgatgcggtggcgctccctcatttgctgctgccgcgtggatacaaggtgaaaccgaatgccaagcagattgatgcacgagctggcaaacgcactgggcagggggaatcgatggctgcagcaatcaatcgggccaaggcgcgacgcgatcatagtcgcaaggatgagatttgctcgcaggcaaggggctttcgctgctagagagcagtggcgccccgatggccggcgctcatctgtaagagcctcatcccagcagagcagagagatggctacaggacggacgcaatgtgcgactcggtacataacgttgaagattccgtcaatattacacaggaccccggaacctgcgatttccactgtgcggtcttggtagacgcgctagtggcagctcggatgaatggccagcggtgcttgcaggaaggcggcgaggcaagcgtcccgatgtcgctcgcaccgctgcagaccccacgttctggacatgaaatccgaatgctgcgtcaacttgtctttggagctcgtgctgggccggtagttagagagcggggaaactcgttggtaccatgctaacggaccagcacgcatgacttggtgtaagcgtgggacacgtgcagctgggcggtgcccaggcggtaagcgcgcgcacggggaggatatctttgcggcccgcaaattgcggacgcattccgctggtcacaaccgggccagcaccgacggaaccgcgaggaccatgtcgacgactccttcgcgcctgggctcggggactcgcttggatacgcgtggagtgccgcacacgagctgtttcgcccagttgtccattgtagcgtcgtgagtgacttttttgacttgcgcccagtatggcgagccctgtcgctttcggtcgcacttagccggaggcgtccgtttttgcctctccggtcacgtacctgacctcattcgcccactttcgattttgcggggcgcgggcgtcgagcggcagcgagcggatactgtaccaagaagacaagtggagtaggccagcatgtgcaaggtggaggagaagagcagcctgccgcccatggcccccgtggagccgcaggccaccaagcccaagttcgtgctgccccacgagccgcagagcgacttccactggacgcccacggacgagccgcacgccacgcgccgcaagctcatcatggccaagtacccggaggtcaagaagctcttcggccactgctggaagaccaagtacatcatcaccgccaccgtggcgctgcagacgtacctggcgctcacggcgcagtacatgtcgtggcccgtgtacatgttcctcatgtacgtcgtgggcggcacggccaaccacgccatgatgctgggcatgcacgaggtgtcgcacaacctggccttcaagaagcccttccacaacaagctgctgggcatcttcgccaacctgcccgtcggcgtgccgtcctccgtctcgttcaagcgctaccacctcgagcaccaccgctaccagggcgaggacggcgtggacgtcgacctccccacggagttcgagggcaagatcttcaccaacaagtccaccaagctgctcttcgtcatcttccaggtcttcttctacggcggccgcccgctcatcgtcaaccccaaggtgcccggcgtctgggagttcttcaacgccaccgcttgcctcagctacaactacgccatctacgtgttcggcggcttctcgggcctgctctacctgctcgtcggcacgatgctcggctgcggcatccacccggtcgcgggccacttcatcgccgagcactacgagttcgtgctgggctacgagacgtactcgtactacggcatcctcaaccgcgtcacgttcaacgtgggcctgcacaacgagcaccacgacttcccgttcgtgcccggctcgcgtctgcaccaggtgcgcgctctggcccccgagttctacgagaacctgccgagccacaagtcgtggaccaaggtgctgatcgactacgtcatgaacgacaacatcaacgcctactcccgcgtcaagcgccacaacctctcggacgaggtcaaggacaagatgaagagcgactagatggacggacggacggacggaccccgtggacgcgtcgtgtcgtgcgcgaggggagcgctggtgttgttgcccccgcccgctgcaatttcgatcggccgactcgcgttttgtatcaatccatgtcgctagggattttgtgctaacaaatatcaataacaacggcaaatgtatctttgaacaaacagagccgttgccccatgcgctgcgatgacttccaggcattcacaagtgatacatccatggtggccttggatcgcgtgtggagcatggttgacatcttcactgtcgatttgaagtgaagccacctgcagtgcccggcacatggcacggcccgtgccgcaccaccaaccaccagctgctgccttcaacatgcatagacgagtgcgaggaggggcgtggcacttgcttgctgcggcggcccgcatcgtccgtcagtttgggattgcattcgtgtcttattttttcctgctgagctaccgctacaacctccgaaatgcaaacgacatgcatctctcacccttcactgtctccaatacacttggcctggcctctctacgcccgtctttcagctcgacatgggtgccattcatctacctcgcttgaccatcctggcttgacttgccttgactaaccttgacgggccttgggcgcgttcgggttgcccagcgtgaacaagcgcggcgcgatggacatggccatgagctcctggaagagcagcttgcacgagtacgggatgtggacctgcgagatctgcgtcttgttgcggcacgtgcggcactcgaacgtcatcttgcgcaggttggcgatggcgatgataccgcagatatcgcacacgtgcacgcggtacgcgtccgagttggcgaacaggcggtccatgaggaagttggccgagccgtgcgagatcagacaatcgcgctccatctctcccatacgcagaccaccctcgcgcgcacgaccctccatgggctggcgcgtcagcatggtcacggggccacgcgaacgcgagtggatcttgtcgtcgaccatatgcttcaggcgctggtagaacgtggggccgatgaagatctgcgctgtcaggcgacggcccgtgtggccgctgtacatgacctcgttgccgtgcttctggtagcccaggttgtgcagcgtgtcggcgatggcctgcacggtcacgtccgtgaacggcgtggcgtcaccctcgtcacccgtctgcgacgacactttgccgagcagacactcgacaagatgccccaccgtcatacgcgacggaatagcgtgagggttcacgacgatatcgggcgtgatgccctccaccgtgaacggcatgtcctcttggcggtacgtcataccaatcgtacccttctgtccgtgacgcgatgcaaacttgtcaccaatctgggggacacgaatgttgcggaagcgcaccttggtaaacttgaagccgtcggcgttcgtcgtcagcatcacgctgtcgataataccgttctcgtgcgaacgcagagccgtactagcatcacgcttctggtggcgctgctccaacgaagaatcttccgactgcggcagcggcgacgtcttaccgataatgatatcattaccactgacacgcgtgccaggagccaccagaccatcgttgtccaacttgtgatagctgccgtggcggagacccaggcagttctcgcgggagggcttctcgaactcttcgcagttggcgccgcctgcaccgccaccggggccgccgtgcgggctcttgttccgctcttggtcaatgtagcaacggtagaacgtggaccggaagaagccgcggtcgatggcactctggttcataatcaaggagtcttcctggttatagcccgtgtacgacgcaatacccacgatagcgttgatacccgacggcaactcacggaaatgcaggtactccatagcacgcgtcgtaaccaggggcttctgcgggtagttcagcacgttggccatggtgtccattcttgcgcggaagttggagcagtagatgcccatggcctgcttacccatagcggactggtatgtgttacgcggcgactggttgtggtccgggaacggaataatactggcacagataccgaggatcatggacgggtggatctcacagtgcgtgtggatctgcgaaccggtgccgacgtccttgggctccatggcaatcatacacacttcctcttcctcggtatcgatcagttccacgacaccatccgtcagcaggttgtgccagcggtagtttgtgatcttgtggttctgcagcttcacgacctgctccttctgcagcagcagttggttgtcctccacgatgaacagcggacggcacacgcggccagcgtcagtgtaaatgcgcagctccttgttcatcagatcgcgaataaccgacacttcggcgtcgatatccacgcaacgacgcagtgaccgcagcgtgcggatcagctcgttcggttcacggtgcacacccacccagttaccgttcacgaagatcttggtcgagtgcgggatgatctgcggcttgatctcctccaggttttctgttgcccactcttccaggaactcaaggatgggagcctgcggcgaacccacagaaatgtaggccatcagggccaggttcttcacgagaccgacagcctggccctcgggcgtttcggcaggacagatcataccccagtgcgtgttgtgcagctgacgcggctgggcctgcttaccttcacggccgagcggtgtgttcaagcgacgcaagtgcgacagcgacgacgcgtacgtcagtcggttcagcacctgcgagacgccggccttcgatgcgctcttctgcataccccagttgcccgtggccagcgagtagcgcagaccgttggtgatcgtacgcgagcggatggccagcgtcaagttgaagtccttgccgttgtccacgcacttctgcaggaacgacttgacgtccttggtcagcttcttgaacaggatgcggaacaggccgcccagcagcgggccggccagatccagacgcttgttgccgtagtggtcacggtcgtcctcgccgatgcggcccagcgagcacatgagcagcttgtgcaccacgtagccgaggaagtaggccttcttggtctcgttgtggtcctccacgccgacgtgcggcagcatctccttctgcaggatgtcctgcgcgtagcggatacggtcggccttgctcacgttgatggcgctaccacgacggccgatgaagtccagcgcgacctcctgctcctggatcacgaaggcctcctcgagcgacgacttgaagcgctccatgagctcggcgtccgagaagtcgtagcaaatgtgctcgaggatctcgcggtcggccacgaagccgagcgcgcggaagatgatgacgacggggatgtcctggcggatgtacgggatcacggcgcggatctggttgcccgtgatggcgctcttgccgccgctcttctggtacatctgcacgtacatggtgctcgtggggcgcacgccgtgctcgacgtgcgagcgcgtctcgcagacccagctgtacttggacgcggcgttcttgcggaagcagtagacgtggttgttgctcatgcgctcctgcgcgatcagcaccttctcgctgccgttgatgatgaagtagcctccctggtcgtacacgcactcgttgagctccgtcagctccttgtccgtcttgtgggtcagcacgcagtactgcgagcgcagcatgatgggcaccatgccgatgaactccttgggggtctccacctggtcgtacgggtccatgtcctcgaggttggccgggcccgaggcgggcgcctgatacttctggcacaccacgtccacgtacagcggcgccgagtacgtgaggttgcgcaggcgcgcctcgtgcgggaacatgacgcttgtggagccgtcggcctccgtcatcgtgggcttggacaggtagatctggccgaacgagatgttgtagatggtgtccgtgttggccttggcctggccgggcgcgtactgcgcctccgggttgatgcggatggagcgcgagtcgtccacgagctcctgcattgtgttctggatgaactcgtcgaacgagtccagctgctggcgcacgaggcccttctcctcgaagtagctcgagatcacggcccacgcgtcctcctgggacacggcggagcccgccgccagccccaggtcgccgccgtcgtcgcgctccgtgtcgctgtcgatcgggttctcccagctcattgttggcgagacgtgcacgcgaccgatacaatcaccaaatgactcgagggggccgggcggcgggccgttggcgggtttgaggtgggccacatcatataggtagggaaatgtggccaggttccagtacacggagagcatttcttacggtaaattacgaagaattacgaagattgtcgtgtttgcatagtttgctgtcggcactatttgttaccagcatcttcatccgacccactaagcttacaagatgcatggtgaattatcttgtcatgtgagcaaaatggcgatctttttcatttgattcaatctcaaactactgcatactccagattgtgcgtttctaccgtgcttgggtgtctcccgcgttttcgacgcgcatgtagaagtagtaactaccggtggataacgatgacaatacatcccgtatccaccgtgtcgatgattctaagcaagtcactgcgaagagctcagactcgagttcaaggcaccgtcatacacatcgtcagtactgaagtagtacgtctcggtgtcgactgaagctgtcgggttgaacgcaggcatttcgtccacgcacgacttgtccaggccttccatatcgccctcgttcttgacaaacgaagcaagtatcttcccaccgcaagttggggaccaaacatcctctggatcaagctgggtccacacaagcgctccgtggatggaagtgttgaacgtaaccagctcctttctgtccccatccagcgcttccagcaagtatttgtgaggcgtctgcgggtccaacttgctactcaggagcagcacgctggcctgactggggatcttggcgctcttgttccagtactcgtcacgttcgtagatgatcccattggcagaatagttgccgtagtggagttcatctgagtcttctttagagaaagcgcagtagagaaggtcgaatgcgtacaatccagaggtgacatttttgtcggtgaatctttttcccatctcggacagcgtaggcgtcggagtttcccacatttccgagaatacgatgagataatagagcaatggcgagtagtatgcggcactctgcgtagtggcggtgacgtactccatgaaacgtttcgtgaagtaggtcaggacgtcgacgtcttgttcgttgcagcgctgggatcggtacacgaccggtgggatgagtttccgcagatccgcatccatcaacatttcaccgagcatatctctcagcgtaaaggagggcagagcatcgtctcccagagttttcacgttgtccatgacggttgcgcaagtcgagtttgggtccttgtcgaagtctgcgagcaactctggaagagctgtaggcagcgtctgtggttgcttgaagtggctgctgcagatagtgtcttcagagcacaactccaagaaccggtcgcccacttcaccatagtccgtttcccacatcgacatgtactcaaacttgccgggtggcgcccccgacgccgtcgcaacgccgtccagaacgtaccccgtcaccgtcggaggattcagatgcatcaagcgttccaccagcattgtttcgtagctggcgccatacacaatcgtattggctccattcgtgtactgcgagatgaaggtcaccacatcagtggctgcactggtgcgaggagagatcgccgtacttatcttgaaggtcttgggcacaagaagcaacttctgacgggtcgatctccttgccattcggagatccggtggtcgtagcttccgccgcgacgcagtccaagaacgtgctacgacccgtaccgcggtggtccatcgtgtagatattggctgtcccattcagctggtagagcaaactcaacagcggattttccactggaaacggtgaacacaaccaagttaataaaactaaaatggaattttttttttgagtgagtacgtactgacagaggaggagtatccgggaccaccttgcaggagccagacgttcgtagtggtcttgggaccaccgttcgttgccggcatgcgcttcacgaagacgtcgatcgtcgggtcggcgaactctcgagactggcgtctcacagattccagggtagcacagcagtgcattgaaggtggcacactcggattcctcttcgtttgggcttccttcgtcggagaaggtgtagtcatagcagttataccagccattcagtcgcgtcttgacgatagtgttggacgccgaggcatggacgccagcacaaatacttaagtagctagtagtggcgcattggcagagagctggcaaattcgaaaatggttgggactcgaggcaaccgggtttggttgattggcaccatggtacttgaagtgtttgaaggaggattcgctctggtgccatcactttaatctcgttgtcgcagttggttggacagtgaggctctgacacagcgttgagcgatgcctgaactgctacagtactaaagcgtcacgttgtttgcgatgatactgttccttgaatcacgatgagatgagcaaaattcacgatgggcttcgtgcttgtattattacgaaaatatctagtggtgacaggatatgtattactgcccctccctgatcgattacgcgttaatagacacgactcgtaatacacccgttcatgctctgtttgggtagcacatgtacaagtaaagataaaaaagattttcttaccgtcgataaaaaaacaccgggggaaaccccttgcatgcaccataattcctatgtatgctcccattcgtatccacaagccatcgtgaatacgtttgtactacagtctgtaaaccgtttttaaaaacaccagctattttttaaaaaaatagctggttctatggcgttcacggctttagaataagtactgctaccgcagctcagtaaaaaaaatcaaaatgttttataaccgagacacattgtacttctctagccatgttgcgttgtatatacttcacccaagtaccacaaaatagcgaatgaaaaaaaatgcacaaactatgacagtaattcatcaacttttcttcaaaacaacactcggctgcgcgaccgagacgggtatatcggattggtctgcagtacatgtagatatgtacgaaatgagagaatactgtacgcagagatcatgcggtttttccgttttctttcttatgtctacattgtaccaacgcgtaatcgaccagggaggggtagtaatacatacccctgtcatcaaatacggagccttcacgaagtccatagtgaacaacgtaacgctgagctgacaagacagttcaagcacaattcaacgctgtgccaaggagctcgttggcaacggaagtccaatcaactgcgatagtacgggtaaaatgaagacttcaaatacttcaagtaccatgatgccaatcaacaaacccggttgcctcgagtcccaaccattttcgaatttgccagctccctgccaatgcgccactactagctacttaagtatttgtgctggcgtccatacctcggcgtccaacactatcgtcaagacgcgactgaatggctggtataactgctatgactacaccttctccgacgaaggaagcccaaacgaagaggaatccgagtgtgccaccttcaatgcaccgctgtgctaccctggaatctgtgagacgccagagttcgccgacccgacgatcgacgtcttcgtgaagcgcatgccggcaacgaacggtgatcccaagaccactacgaacgtctggctcctgcaaggtggtcccggatactcctcctctgtcagtacgtactcactcaaaaaaaaaattccattttagttttattaacttggttgtgttcaccgtttccagtggaaaatccgctgttgagtttgctctaccagctgaatgggacagccaatatctacacgatggaccaccgcggtacgggtcgtagcacgttcttggactgcgtcgcggcggaagctacgaccaccaggtctccggatggcatcgagttcgacccgtcggaagttcctgcctgtgcccaagacctccagaacaagtaaggtgctcgaccagtttaccgcaatgttttactttttccgcggaaaaatggtcataactttttttctagacatcctctcagaaatttaaaaatatgccgcaaatctacagaaactcgtctacaacaaggtgatcttgtcgtggttctagtgttttgtaagcgagctacctgcatcaaggaaaaaccaggatgctttgacgagcgccggccagtttagcgcagcgaaacatattggggtttgtatgacgaagcatccccattgcagaaaacgcgtaatgtgttacaggaagagacaaagtctgtacgctcttcaccaaagtgcgtacttttttcaccacaagggccaagggggatgcttcgtcatacaaaccccaatatgtttcgctgcgctaaactggccggcgctcgtcaaagcatcctggtttttccttgatgcaggtagctcgcttacaaaacactagaaccacgacaagatcaccttgttgtagacgagtttctgtagatttgcggcatatttttaaatttctgagaggatgtctagaaaaaaagttatgaccatttttccgcggaaaaagtaaaacattgcggtaaactggtcgagcaccttactcatggaatgatcgagtatcgtggggtccaacttgcgccatgaagatacttacttcgtacgccaggaacaagggcgacctgaaggggcgggacaagtcgtgcatggccgaaatgccggcgttcaacctgacggcctcgatggcctaccgggcctactactttagtgccgacgacatgtacgacggtgccttcaacgaaagtctgaactcgtcccagtgagtttctttacaaacctggggaaacgatcgacgtacatgtaggtactactagaggtacagtgacaacaccaaaaaagctagaaccgcatggttacgaggggtttagaggcttgaatagaatctacagaacatgtagttcaacagataccaatcctcgccatacgataagcaatgcagatattccgtcttgcattttccagatatgaactgggtttatgtggcagtaatgaggcccattacctgaaatggcaacattggcgggcgtggtcttccccagaaatcctgctactgggcatatacacatgtttacagatacatgtacagatatcgtgacaagctcacggagtggagtgcagtacgtggcaaactttcctgagcgacggttgtcgtgctgcgtggatgaggtatgtacaactaaccaagaagtgctgtccacgagaggcagatgacgggtgaggcgttgcagtttcgggacgatagtccgtcgtcaccacttagcatgagtatgacgctttcatatgatatgaaagcgtcactttcttagcaaacctacgattaaataccggtaatggtcggtactactaggctgtggtcgcctcgcgtctcacgccgttggccgctcgaagcattagcaactggcgcctcgcatgtctgtccgccagcctgtcgccgagctgtcagcttcgccagcagcaacggcatagcgtgcacctgttcttgtgccgctgaaaaaatggccgtccaccctgcgtcgtttgtttgcagggactggcatagagcagatggacacagccacctatacaaaacacgctccttccgactcgaaaccgcaagtagtatcagcgtgagtacttagtcgaaaacgaaagggaaccggtacgtgatcggtattacacaagtgaaactcagcactctttcaacacaacgcgaaaaggagacacgcgaggcctctcccccctcctaggcgcctgaagcacagtacggaacgcgccagtcgaggctcaagcagcgcacagcagtctgctgctgtagaacgccctacctcccctctacaccccccccacaggaccccccccccttcccccttcccccttctccctcttctgcagccatggcgtcggtcgcgtgcatccagtggatccgcgacgagctggaggcgcacggcgacctcaaggagctgagcccgccgctggtggagaccaagtcgctgtgcgagttcgtgacggacggccgcgcgctgtgcctgctgaccaacgccgtgctggagggcgaggagaacgagctgcccaagaagctgcagcgctcgctcaagcagctgagcaagttccacgcgctcgagcgcgtgcagttcttcatcaagtggtgccgcacgcgcgcgctgctggaggagcaccaggtcttcaccacggtgcagctgctggacgaggtgaacgagacggccgtgtccgagaccatcgtggcgctgcgcaacaagacgcgccccgggctgcgcgcctccaacccgctgtcgcagtactacttcgacggcgacagcaataacaacgcggccggccgcgcgtccacgagcagcaccacgagcacgggcagcggcagcggcgccaacaacgccaaccgcctcagctccttcctcaacaagttcccgtcggcacctgtggtggccaccaaggcctcgcagcccaagccgcccatgtcgggccaccgcgcgtccctcacgtccagtgtggccagcagcaacccgtccccgaggcccgacctggaggaccccgtgccggcggacgaggacaacaacaacaagtcgaggctgcgcatcccgtccatcttcagcaagagcagcagcaacggcaacaacaatgccactccccgcagcagcgtgctgagcaacccgtcgtccacggcctccacggccaaggaggagggcaacgaggcgcgctcccgctcgtggtccagcaagctctcggccttctcgcgcagcgtctccacgtcgtccaacgcgtcggccccgcagtccacgcccacgcccattaccccgtcggctggagagcagggccacaacacgccgacttcgtcgccgcctgcctccccgcacaatagagtgagcatcccctcggccttctcggcaccggctcctgctgcccccaagtccatgtcgaagctgtcggcgttcttgagcagcgttgagccgtcgtcgtcggtgggacccgcgtcgagtgcgccgtctcaggacaagaaggcgccggagccggccgtggaggccacgcccgaggatgacgaggagcctgcgattgaggacaaccaggcggaggaggaagccgagcacacgcccattgaggaggaggtccctgctgaagagagcgccacgcccgaggtcgaagccgtgcatgagccgctggagaagccgccctcaagctccaagctgttcgccttcctgcaggccgttgagccggctagcgtcgacccgccgaaggtggaggttgaagctccggaggaagacgacgatgacttcgttgcagtggaagcggaggaggccgtttcgacggaagaggagaccccggccgtggaggaggaagtcgcccctgttgagaaagaggaagaggctcccgtggagaaggaagtagtcgcagctgagagcgaggaagtgcaggaacaggcggtcgaggaagttgcagaagccgcccctgaggtgcacgacgaggtggtggaggagactcaggtggaagtatccaaggaagtggcctcggacgaggagatcgaggaggctcctgaggacgaaaccccggagaagttggaagtggaggctgctgctgtcgtagaagccgctacaccctcaccggagcttgtccaggagaacgagcgtctcgccgcggagaacgaggctcttgctcagaagctggaagtcgctgaaactgccgtttcaacaaaggacacagagctggaggcgctcaagcaggagctcgagcagctgaaggcacagcttgcggaggagcaggccagtgcacacgagaagattcagtcagcagagaagaagcaggagtcgctcgccgcggaggctgccgaggcccgtgccgagctggccaagtcgcagaaggacgccagcgacgcagcatcggctgtgaaggaggcaaaggaggcaaagagccaggtggaggagctgtccacgcagaacgagagtctgaagtccgacttggcgagcctccgtgaagaagtacagaccctcgagcagtccgtgcagctcgcgcgcgacagtgaggaggcagcaaggtacgcggcgcaggtcgcgtttgcagctcgtgactctgcggacgaggtgaaccagcagttgaaggaccagctcgcgcagctcgaaaagtagaccaggacactgtaggccaagcatgtacgcaaagatcaaaggccaaagaagcgtgaggtaacgagatgattaattttgaattggtttcatactgattgctgcttgcccctgtcgaagatgggagctctgaagctagatggagtctgtctggtatcctgccagacttcgtcgtaggaccaacgcgccagcgaagcccacgatcatatagaggacgactacgacggcgaataaccccaggaggtgcagagtgctgcgcagatacgcctgcacgtctgccgctgaccactcggggcacttgccgcagcttgcaatctgaacgaagcacacagcaacacgaaacaaaggttagtcattttgacatgccaactacgtgatggataccgcaacgtacgtcgttttgttcgtagccctggtcggcttcggcgttcagcagcgtcatgtcttcaatgcagccgctgtctgatgtggcgttcgaaccgctggacgaagtggcattgcacgacacccagaggttgtcggaggtctgcatgacgccctcgcacgggatcatctcagaagttacgtcggtgcagttggtgcagcctgtgaggccgatatcacaggccaacgtagagctcgtgtgcgaattgtacgtcgacgccaggtggtccgagaacgagaaggcgctcactgagcacaccaggagtgcaacgaggcagccgccgagaccgatgatgtactgcccgaaacaaacccaacaacttcaacgtcagcaccaattcaccctcaacctgccaccagctctcgacgtacaatgaggagcagcgaccggctcttggctcttgatccgatgatgcccagcaccgacagcgcgaccatcagcgtgccgacaacgatgaagatgatcgctgcacatacaaacagtaccccacactttcaatcagcaccctaaactccctacaccaataccgttgccagcacgtaccgatccaccgctggccggacgtcatctcgtcgtgcaccttgaccgagagcccgaagatgaagagccccgtgcccagcagcgagaaggcggcgttcgtgaccgacaacatgctgcgcatgacaatcggcaccgtgacgatgcgcacgacgcagtacatggaggcgagcaccagcagcatgcacgtgacgcccacggcgcccaccacggccacgcggtgctccaggtactgcaccgcgtcgctgtacgaggcgcagcaggcctcggcccggagcgccgccagcacgcgcgccgtccagtggtgcttgacccacgactcgagcgcgtcctgcaggaagaaggcggcgtagcaggccacgaagagccccgtgaccagcaggaagtccacgaagaagtagacgagcagcaggcggctcttgtcgcgcccggcgccgacgaagcccagcgccgagagcagcaccacgcagccgcccagcgccgcgagcgccgccgcgctggcgccgaagctcgtggccagcaccaggtgcagcgccaggcccagcagcgccacgccgcagccgaagctcagcagcgtcagcacgcgcagcagcttgcgggacggtcgcattgatcgatttgatgctcgaattacaaatgacttgggtggagatggctacttttttcagatggatatttttggaggttaagcgcgttgtccaatggtgtcgcgtttagagcagacttttggccaatagtgaggcgggttgagattatctgatatatacgtttccgagggcttagtcgaatattcatttatggaggttttacttcaacttgctgatgcttttttaggtacttggcttatttgccccacagtctattggggggtcaagttgcggcgaattgcgatgcgttgcggtgtgatctaatctctccgtccagacagcttcagctttggcatccgttaaacttgacattgcccattgacctgcgtccatttcgtcacctgacccagtgcgcagtctgcagtctccagttcatcagctcaatgttgacgaagacgctctcgctgagccgctccatgtcgtcggtattgctctctgaccgtcagcgccaacatggctgcaccgcgggcttgacgctcatccgagtgctgcgcaacgcaggcttgagcatcctcgtgggctggctgtccgggttcgtctacactctgggcaacgtcgcgtccgggaagccgccagccgagcagtcctacgcctcgtacgtcaccaccaacggcgtctggttccacggcgtgttctcggccacaatggtggtcatgtatgcgctccggttgacgcccgagaagttcgtcgcccgttccagacgcaaaatgcctgagccgacggagcctacgtcgcgaacgctgacgctgctgcagtccagcctcaagcagctgtgccaagctgcttgagtcctgtgagtcgaattgagaactgattgattgaatgaagttactcctggcatctcctagcagctagactactcatgtagcgccttgaaggcaccgtgtgtacccaaagcaagggttcaaacgaacccagaacgaaactcagatgaagtcaacccttacgccagggaggacaggcgctagtgtcgacagggtgcagaaggagttgtcattctccctcatgccaggatgtcagtgctgttaaatcaacacgggaagattcgcctgatgttgactcggtactcgcttgatccagtgtcgaggagcacattgccgttgtcgtagacggccttcacgacgaacgggcccttggcgactgggtcggttttcttcctttcacgagcagggacacggagcatgacgttgtcacctacacgatagaagtgctgcagtcgccgcatattttcacgatcgttgtcctgcatgatggccatgaatcgctgctttgagaggaagttccagttggcgaaatgcaactcgcgcgtgatcatgtcctcgccaaacatcaattgagcgggggaagctcgaagtacggagtgatagctggcccttatggcgtaggcagcatagtcgagggcgacttccagctgatcatgcaggtccgggcgtacgcgaatgatgttcataatttccaagtgcacgcgctcgcagatcgcgttggcctgcgggttctttgcggtgatcggtttgtccttgatcgccatcgaggtcaatagcagctggaactcgtctcccgtgaattcaggtccttggtcatgcacgaccagttttgggcgaggataacggcagagccacacgcgctcaaagctcaaagccgtagttgccgaggtcttgtcgcgctgcatcaggacctctaaccagcgaaattgctgttcaatcaccgtcaagcagtagaagcccccagtaaatggccccaccaaatccgcgtgaacgacgtcgaatgggcgatcggtgttggatgcaggagttggtggcaggtgtccatactgttgcttcccaccgtgcagctttgcctttttgcagtccacgcaatctttgacgtacttctccaccgctgtctgcataccaggccaccagaatgtgctcatcgactgatactgcttttcagcggtagagctccacgatactacgacgcagcgtctccggcactacgacacgtttccgatggtgaagtagcacgacgcccagcgcaggacgaagtgaataatcaggatccgcttcatttttctccagtcgtgcaatcactttcttgcaggtagcatcttgaagctggtgcttcgtcatgacgacgccatcaattgctacttcttcttcttcaactacgaaaagttcctcttcggcgatctgcttcacgaagtcgtagcggagtcgggagaacgcgtcagcacccacgttttgcttgcctggaacgtactcaacctgcaagcgatactcttcgaggatcagcttccaacgcttgactcgcagagggttttcgcgtggaaacaggaggttcttgtgatccgtatgcaccaccacaggaaatcccagcaacattgtgcgatattcttttagtatttccacaacggagagcaactcccactccatcgtggaatacttccgctgtgtgtctgtcattgagcgagagaagcacgcgatgatccgcttgccctggaggatgacacctaatctgctggccgctcgcgtccgcgaacacgtgaaaaggacggctgtaatcaggaaatgctagccatatattgcgagccagcgccgtcttgatctctagaaaggctgcagcatcctctggcgtccaggtgaacgggacattctttgacgtcaggcggttgagtcgggctgtcaacgccgacttgttcgggaccgtttctctgtagtacgcgatcatacccaggaagcgacgcaactccttcttgttgcggggttcggcgatctgctggatggcttgtaccttcttcgtctggggctggatgccgtccgctgctagggtgaagcccaggtagtcaacccgatcgcgaagaatgtgacacttctttgcgttgagggtcacatcgtattgctgcaggcgctcgaacacgatcgttccatgcaggcttgatactcgtctggggctgtcgaaatgcccatcgggagcctcttgaactgaaatttgccaaacggcaggcagaatgccgtggctgggcgactttgcctcgccagccgcctcgcgaagtagcccatgttcgcatccagagtgctcatgcacttggcgttgcccagtctcagcagtatttcgcggattttcggtacgtaatacggagatctgcgcaggtacttgttcaactggcggaagtcgactaataagcgaagagatccgtcaggtttcacgagaaagaaagctggcgcagaagactccgggccgtagatctgctcgatcacatcgagctcaagtagccgctgcatctcgcggcgggccgcatcttcttggctgcgggggacgctgtatggtcgcgcgtgctctggtgtgtagtccgctcgcaacgggaggatgtagtcgttcaagcggatgcggccgagtcgcccgctgtacaagtccacatactcttccagcaatttcaggtagcagtgctgaagagctgcctctaagtgcagaggcatcaaatccaaaggcgtggcggctgctgcttcacctgcaaagtattccaaagcttcttccacagtcaagtcggagtcagggccggtagctaggtcgagcttcttgccagtggtgtggacggcgagctcgctaccgtcccattggacgatgcccttcctgaagtcgatcactaagccgagtgccgtcattaagtcgcgcccaatcgtcatatcgtccggaagtgaagataatacctcgaattggtggacaatgaccgagtcgcgtttaagttgcgggatccgaaagcgcacaaccatggcgccttcactttgcgtttgccccttgaccaatttaaatgaagttgtagagttctccagccgggcctcgtgtgactgcagcgtgcgcatgagagctgagctgataatgctgcgcgagcacccactgtccatcaaggcttggtagcggtcctttcctgcctcgagcttgatcatgacgcgcattgggggaggcgagctggccggcgacgcgtgcagacccacgaaaagatactcctcatcgctggagcttccggcgcgctggcgctgttcgacgcgcgtttgttgctggccacgctgtccgcgttgatcactcctaggcccgcgtctctcgtccagttgttggtgttcctcctgctgattatcgtggcgaagagcgcggcagtcctgggtgttgtgcgtgttcgtccggtgaaagctacactacttgttactcgccgacttgttgccggtgttgtggccgttgccgcgaccacggtttcctcctctggactgttgccgattgttgttgctgttgctgctgttattgcgattgctgccgttacggttgccgttgcttcgacggctgtgacctcgtggattctcgttggcgtagttacgcttatcctgtccgctggtacggtgcagtcgctgttcgccctgctcaatgcgctcgaaaaatggcacgagggcggccacggtagtacagatctggccgctcgcatcgtacttgttctgccactcgtacgggaggccgcgcttgtagaggcgacagagcgcgtcttcgcacatcggcgagttctcgttcagcagcgcgagcgtgtgctccatgcgcaccaaggcgcggaaccgcttgcttactctgacagcgattcattgcgggacttcttgatctcccacagctcctcctggagcttctcgctgtagtccgtcggcagcacgacaaccgatgccttgcgcagtgcgcgagtgaactcctcgtccatgcgcacgtcgtcgtcggtgatcgacgcatcttcaaatgcctcgcggagatcgccctcgagcaagatggtcgtgttgaggaacttgtcctccgcgttccagtgtttcagcttcgccagctggttgaagtggtaggtccactcgaggaagtccttggggccgccgtcaatgaacttggccatcttcttcgtgacgacctcctcctcgatgcccttctccttgttcgcagcacgcactgtgattgagtacgtgaggtagcgctccttgtcgtccttgttggtggagccgctcatggttgtttgggttggccgacgggtaaacctggtcggtcttctttgaaacgtttcaaaatgccaagccgcttgagtcctgtgagtcgaattgagaactgattgattgaatgaagttactcctggcatctcctaacagctagactactcatgtagcgccttgaaggcaccgtgtgtacccaaagcaagggttcaaacgaacccagaacggaactcagatgaagtcaacccttacgccacggaggacaggcgctagtgtcgacagggtgcagaaggagttgtcagctgtggtacatggccccgtatctagcattttccccggcggcggagatcgtcggctgctacatgctcatcagacaattgccagagtcaaagcgcaagtacaaaccggccatgtacatgaactcgttctggagcaactttgtgttggtcagcgtcgagtactgcacgcgcagcattttcaacgcggagactgttcgaggcttgacgcgcacacagttgagggagtcgggacaccagggccagcaaggtaacaacaagccacagccgcagcaccgacgccgatactcgcggatgtcgtcgatgcggcggttcattgccatttacctgcagaccctccctgggattgtgacatctttgatcgccatcgtgtacgtccactccatcagtctcttcgccacgatcgatcgggagacagagctactggcctttgctatcggcagcatcgcgctcaagctcacgctgcaggaagctgccaagcgccacttgctgtctaccaaggaaccactgccacgacgggcgatgatcgcgctgatctccaccccgacgattctcgttgacacgcaggtgcgaatgctgttgatgcggctacaagacgtgacgatctccgtcttagggtcggcactgctggcgctcgcggagatctcagtgcgcgcgttcaagtcgatgctggtccatcgacaagtccaccaaatcctcaagcagcgcgtcgcccccacgatcgccaaagtccggcgccgagccaccgtaacacagacaccgtctgcttccgcagcagacgccggtcgagccagtcgtcaagagacgaaccacctcgccagcgcgccctgcgactgatgagacggaggcgcaacgacagaggcacctcgtggtgcacgcggccgagatctacgcggacatgtacgccgagtacatggccatgggctgctcgtacgccatcatgttcttcttctgaaaccacccgcagtaccagttcctctccaaagccgcgtccgccaagtccgagtccgtgcagcagctgcactacttcctcatctttgccttccaggtgagcgtggaggtggcggtggactttgtggcctgcaacgtcgaggccctgcagggcgtcgacttcggcagcttcgaccagaacgacccgttcctgaccttcttcatgtccatgctggccttcgccaacgtctccatctccgcggggctctacatccgctcgtgacagcattgatcagcattgctgattaacaatgcgttgcacctgagaccgcggttcaggccgtgactaccgtgggacgatctcgtatacgaactgagccggaccacaccgtacccacttcggacagcgcgcatgcagggcaactactggtctcctggcccccgagagccctctgcgagtacctttgctcatttcagaaagtatcgcgtcgagcgcaagcgcttccttgatccagtattggtgtaccatgaagctccttcatctcattccgatggtgacggttctcgctcagccggctacctcttcctcctccagctcctcgtcctcaagtagtggactcaacggatggtatccgtgctcggagtcgactttctcggacgaagggggttctggggaccaagacgctgagtgcgcggtctacacggccccattgtgctaccctggtgtctgcgagacccccgaagggatcgactcgaccgtggatatcttcgtcaagagggtcgttgctttgaacgactcggacactgccaccaacgtgtggatcatgcaaggaggcccaggcgcttcctccactgccagtacatagccggtagctgaagtagccatgaatcgaacactgccctaacctttgttatctgtgtttgcagtggaatcggcgatggtggagctccacgctcgtctgaatggcacagtgaacgtctacaccatggaccaccgcggcactggtcgaagcactctactcgactgcgtggcggctcaagccacgactactggttccccgtacggcagctccatcgacgtgacggaggtccccgcctgtgctgaggctctggagaagaagtacggcaacctctcctctttctccatgacaagcgccgcctcggacatggcgaccttcatctccaactactcgaacggagcggataccatcgtgtacggagtgagctacggtactgcattagtggagcgcgtgatccacttggatccccccgaggtgactgggtacgtgttggacggcgtcgccacgagctcgggcgcgtctggtgacaaaaccttcgagtacttttcgacctgggacgccgactttggggaggtgggggacgccttcatggcgctctgcaagacgcaaagtgagtgcaacgaccgattcgcatcgactgatctctccacaacgctgcagaacctcatcaacgacttcgactccaaccccaactcgacgtgtgcggccttggtgagcagcggcagctctgacccagcgtcgtacacggtgcgggaggctctggggtcgctgctgcagggctcgcgtatgcgcacgctcatccctcccgtcgtctaccgcctgaatcgctgcgcgtccgaggacatcgacgttctgacgcacttcttcgccgctttgaactcggacctctcggccccagaccaggagaacgcgtttgaatccacgctgctctactacctcattgtcttctccgagttgtgggagaagcccgagccgtccgcgtcggaaatgctggcgcggttcacgaacacgaccatctcgaacggagggacgtacacggagatcccggactattgcgccttctcgaaggagaactcgactacgtgcaatggactggaagtcggcaactactccgccaacgggatcatctacgagcgggacgagtactggaacaagagcgccgtgatccccagccaggccagcgtcttgttgctcagcagcaagctggacccgcagacgccgcacaagtacgccaagtatctgttggaggcgttggatggcgaccagaaggagctgatcaccttcaactatgcaacgcacgggacgctgtggacgaccccgatggtggacggggactactcgagcgagacgtgcggcatgatgctgctcatgtcgttcgtgaccaacaacggcgacttggcgggtctggacaagtcttgcgttgaggagatgcccgcgttcaatctcacggtgccgctcacgtaccagcattactatttgagtacggacgacgtctacgacggcgtgtacagcgccagtctgagtgcgagcggatcgacctcaggcagtgcgagctctgcatcagacgggagctccaagtacaaggccgtctttatcgtcttcctcgtcctctttgtgctagcgctagcgctggcgctcgctgctttcttcgtctaccgctggaacaagctcaagcatagcaagacggacgaaaggacgaccgaggacttgccggggcacgtagagatcctgtctccagtcgagctagccaagtaaacctaagaaataatgggaacttcactagcgataattcgttgggatcaagctggaaggtatccggataatgatctcaggagcaccaactccatcacatttagactaagagatggctagcagcatcgcgtatcaacccaaacacggcaaaacggacgccgccgcctgtcagtcctcactctctcagttcagaaaacattctgtcgagactgtgctgtaccaaagaagcgctagacgcgctcaacacgctcgactaatcgacaccacacttctctggtcgagatgcagctctaccatgcgatcgcgctggtgtcgatgctcgcgcaggcgtcggctgcctcaacttcatcttcatcttcgtcttcgtcttctaacgatttgaacggctggtacccctgctccgagtccaccttcgcggacgaagggggatctggcgacctggatgccgaatgcgccgtgtacaccgcgccgctgtgctaccctggaatctgcgagaccgcagactttatcgactcgactgtcgatattttcgtgaagcgcgtgccggctttgaccgaccccgacagggcgaccaacgtttggctgatgcaaggcggccccggagcttcatccactgcaagtaagtgctgtccgtcttggattaattaccgctatcgaatagataaactaacgtttatttttttgtagtggaatcggctatggtggagctccacgcgcgtctggatggagccgtgaatgtgtatacaatggatcatcgaggtacaggtcgcagtacactattggattgcgttgcagcgcaagcaactacaacggggtccccttggggtagctccattaaatcgtcagaagtcccagcgtgtgctcaggcactggagaagaagtacggcaacctctcttccttctccatcacaagcgccgcgacagacgttgcgactttcatctccagctactcgaacggtgccaatactatcgtctatggtgtgagttatggcactgcgttagtggagcgcgttattcacttggacccaccggaggtgactgggtatgttttagacggcgttgccacgagttcgggggcatctgcggacaaattcgagtacttttcaacttgggattcggactttggcgacgtgggggacgcgttcttggcgctttgcgcgactcaaagcgactgcaatagccgattccagacgaacacgctcccagtcacgcttcagactcttattacaaactttgacaacaatcccaagtccacgtgtgctgcgttgatcaccagcgcgtacagcgaccagaacagcggcccaccgtcttacattctacgacgagcgctggggtcgctgcttcagagcgcgaagatgcggacgttgatccctcccgttgtgtaccgattggatcgctgcgcttcacaggacgtcgacgtgttgacccacttcttcgcgttcttgaacaagttcgagggctacccagacgaggacaacgccttcgagtcgacgctgctctactacctcatcgtattctccgagatgtgggagcgaccgcagccctccatctccgagatgctgtctcgattcaccagtactcgaatctcaaacggagggacgtacacggacatcccgcagtactgcgcgttctcaaaagaaagctcaacagtgtgcgaccatctcaacatcgggaactacgatgcgaacgggattatatacgagcgcgacgaatactggaacaagagcgctgcgatccccagccaagccagcgtcttgttgcttagcagcaaactggatccacagacccctcacaaatacgccgagtatctgctagaggctcttgacggcgaacagaaggagttggtcaccttcgagtatgctacccacggtacagtgtggacgacccctttggacgagagcgacgaggacagcgagacgtgcggtatgaacctcctcgtgtcgtatgtgagcgttgacggcgatttggatgcgctggacaagacttgtgtggacgagatgcccggccttagcctgacaccgccgcttgcgtatcagtactacttcctgagcacggacgatgcgtatgacggagaatacgatgaaagtctggctgctcttgtcatcagttcaagctctagtttagctggctctgacagcagcaatacgttggccacaaccaccaaggaagatgcgacatacaaaatagtcttcatcgtgttcctggtgctcttcgtggtggcgtcggcgattgcagtcttctttgcgtaccgatggtacaagctcaagcaccagaaaccagcgagcagagagaccgaggacttgccggagaatatcactgtctcgacgccagctgaagtggcttcggcatccccagaactggcgacttccttctcgacgcagcgagtttcgtaggaaatgggccactagcgagtggccaagaagtagtttcagctaggatatacactattcaacacaaaaatatgcctatgacagcttcagactgattgtcgatccaagtattcattgtttttgtaatgtctaccgaagaaggcgcaccgcattgtacagataacagttccatcgctatctttgataagttctgactcgtgcagtccgcctgaacgcccgacattgctgatggtcatcgaacaagtcgagtttggagttttgccgcaagcccttgagcacaggcaaaaaagacggtcaaactctcttgggatactcgatactgtaactatatttgtgggagactgtggatccagttgccaacttgccaactggcagttggcaagaagtgtacatctacctaaaataccactattgctgcaatcaaatggtgcgcgatacgaagggtcgccacctgggtacataaaacataaagcattgcccttactgtaattggtgtagttaatcagcgtaagaagtctagtttgcgcttcactattgtcaattccgttgaaaatttccaaatcgggccgatttcgaaaatcgaccaatacaaattcaagtacagatcgaaaccgctccaaacaagaatgccatatgtaaatcgtacttaaacgagctccaatagacaatccaagtggccggggcgattggggagcgatttggctcgggcgattgcaatcggccggttcggaaattttgagtagaacccacaatattagggggccaccaatgtctacttcataacgaaaatagacatcaaaagctcagttcgtgagcgccacctgccgtgctgttgttgagcgtgatgtcccagtccccagcttacatttgatgtaggaactagttttttttttcatcttcagcgctgacaaatctgtctttatcattagtaccagacaacgacgatgaaatccgccatacctttgaaatccgcccatgtcgttcatgcgatcaaccaatcatatcagcggatctgtatattttgtgtaaaacgcgcactttccacgtaatatatggactttatcgtgtacactttacacttttatgcatactcaagaccctgatcggccaatggaaatacactcgaaatccttaaagattagcgttatacttgaggaaagtgttcagatagcgggcggatttcatcgtcgttgtctgtactgcaagaaaaatatccgactatattattaaggtatggtgccagtcgcgtgcaatctgccagttccgtgccactttagcttcaaccaattagaacgccgtaaatatttttaaagaaccctattggtaaaaagtatgtaccagccagtaaaacccgccaaactgtatacgaccaagacacatttcccgccagtttgagctcagtctcctatttcctgaagcctacaaaccacccaccaaccccgcagcgaccacctcgacaatgcacgcgtacgagatcgaagacctcaattctgtagtgaagcgcgtcctcaccggcgacagcgcccgcagtgtcagcgacagcaccccaattccgtatcggacccttaccaaatgggtcgcgaaggggaaaatgggcatcttccgcgcacctgttcgtcatggcccggctccgctgctctcgcaaccagcggaggcatgcttggtcgagtggattgtcgggcgccaactggtcggtcaccccgcaagtcgcaaggggatcatcttcaaagccggcaccatgagctccatgggcactggtcgaacggttggtggcgggtggtaccgccgctcatggagcgacagatgctggcaacccgaacgtctcaggtggtatgcaaggcccgcaacgctgtgaccaagagcgatctcgagcagttttgtttagctcgttgatcaaggctgtggtcgagaatcggttggacgcgtctcgcgtgttcaacatggacgaaacagcgttccagaccaacaagggctccaagcgtgtcgtggcggtttgaggctccaagaacgtttggcaccaagacgttgcgctctcacgctggtcgcgtgtggcagcgcgtcggggtgcatggtgccgccgcttttcgtgctgccggggttgacagtcaagctcgaagttctcgatggctgcgccatacccggggctgccgtcaccacctcgagctccgggttcatgaatggatttctctttctagagtggctgcgcttttttttcggctagcgtgcccaaggacgtgcagcgacctcttctcctgattctggatgggtgttcgtctcattactccgtggagatcatcttagaggcagcttggcttggcgtgcatctgttgttgctgccttcgaacgcgacccacctgcttcaaccactggatgtcgctgtgttttcgtcgtccaaggcgaagctacgccgcctaaccgagatctacgttggcgagtctggacgcaattcggtcgacaaagaggaagccattcggatggcaagcgcagcatgggtaggatgcaagatgggtgagaacgtcaaagcggggtttgctgggtgcggccttttccctccgtccaaccctcgtatggacatgtgcatcgacaatttccggcacaacgggacccccgcatctacgaagctggcagcgtggctccggatcaaggaggatgtgcagaaggatgtgctcgtgctatcgccgtccaagaagcgggtgcgcaagacagcaacggtcgccggtcgttatttgaccaaggaaacactggaagcgatggcacaaccggtgaagaagaaggcagccaagacgaagaaggatccgatggcaacgaaggcgacgaagacgaagagggcgccgtctccggtgccggagcctgtgcagctgcagttccagtctgcttcgaagcacggtgaggcaaaccagcaggaggaagttgtgtgcgaggcggtagtttagtataaccaaagaaaaaagcttttgctggggcattttccaccacattgtcttcattatttttttgtttatttcctactttctatagtgatacgatatccctatgtatgcctgggcccgctgtgatgtccggtttttgagatttgacgatctcaaaccgttatcagaaggggaacccgactcatggtacttagcatactggcggtcaatcagttcactcggtggcagccgtcggtcgctttcgcagttctgtgacagccccctaatgctctaattgacagttagcacactagtgttcgggttgagttaatgctgccaggtggaatccaccgtcctctcggttatgatccgaggactttaccactaagctatggcagcgctgcctctgagcacaaaatggactatgtttatacacaaataacataatattgtgcaccatattgtgatattgtatatcctgccttatacgatttcaaatgagtgcaaatcattttgtacaggtcgtttcggtgctgtcatgagagcaaaaagagatttgccccccttacaaaaccacagataaaatgcggcagataactggtcctgccgtgaatgggcttgcaaatagtcagcaactcctaattgagctctcgtttactgtagagctcagtaaaacggtctgctaacagaagagattacgctctcttcagatatgcgtttacatctcaaaactaattgcccaataaaaagttatgagcaaaacagtgagcgggatgacatttaggcacacaagtggcaccgtaccttacttctatccgtctatatggatatgtactactcaggccgacactagttcgtaaggtgaaacgatagctctagggttgaaaccgtacagttagagttactctgtagcgttggagtcgtatgtggtgtggtaattccactaaaatcctcctctaccaaaaggtattagagacaccaacaacacgctaacccgcaaaggtaaacgcttattggatcaaaacctgaagaccaggaacgatcccttacaccgggtcggttgcaagcgcctctgtgcaccttaggttgtcttcggtcaacccaaaaacctgtaccactagccacgagcttaggctaggatactatgtagcgctttcgcgcaaccccactacagcccctcagaaaggaagggtaccggcgtgttaggccttaaacagggggaccaaggtaaaacctcggtaggtaggctaatacactcagggatactctaatcccacaaatatataccgaacgatactctaataccgttcctgcctctccggccacgccaactcttggcgctgtcatggaaactcttggtcaatgcacgataagctccccgacaggcatccacacgcagccgagcgtgtccaggcactacaataagctagctacacttaccgaagtcggacttgacccttgttggctttgggggaagactgtctttttattactgagttttctgaggccctgggggcctcgttctggccatcctatgatgagtcctatgtccctatacaaatatctagtgtgaacgatcgcaataaggcgattccggacacatcaaatgacgaccgcggctacactaataagtgcggccgaagtacgtaactaaatgcatctgtacctaaaagtgggtaccatgaagcctcgttcggggttctatcagggcccgacgaggctttggccactgcctgtcactctaccgaggataatgtcatcatccaatcagaagcagccatctccgtctctcgcttggccttgccttgatcgccccttgattgaacttgattgtcaggctggcgggtcaacagcattggaaactgccactttccaataccacaactgcccccgcctcgacgcgagcctcccacgctggtgagcatctaggcgtcctcagttcttcgactccatggctcctccgtcgcgtgcattcgccgacgcggctgccgctgctcttcgggctctccagtgctccggaccggtacgttcgtcgctcccgctgctcctcactgtcatttggatcctcgttgttgactccatctctttcttgatcatctcagggagctgttgatgtcgccaccgacacttcgggtcgtcgtccggcgcaccaggctcgttcggcgggtgcccccgcccctatcgccgctggtgctgtgcccccagccccgaccgcacctgcaggtgaccctacgctcattcctgccgcctcctggacctcggtcgaacttccaccggctcctccaagtagtcctgagtctgctgctggggcgaccgagactccctcgccggcagttcccagtgaagaggctcccgactcgccgccgacacctccgccaagcgccagcgctccaccgtcgccaacccccgcgccttcggtcacgttggcaactcgcggggcgtcggtggggggggggaggcagctgtagggggtcgcgccggagctgttgctggcccggccgaggttcctccgacagcggtcgtcttgggcgagcagcagatgctggaactcgctcgtctcgtcgtgggtgttgcccgttcacctccagctcgagtcaacgctgctctcgaccacagcctgccagctgctactaacgtcggcgaggtgctggctgctgccgttgctcctccgcgtctccctcttgcggaggctgatgaactggtggccctccgccgcgagaacgaccggctacaggcagagctctccgacgccaaagataaactcgctgaagagatgaacctgcggaccaagtcggactacgtcctcgtctcggccaactccgagtgcgaccaagctctggacctcgtccaggacatgcgcgtccagctcagcaacgccagcgctcagttgatgcaagcgaacgcggccatcgctcacctcgctgacgtcactcagtcgttggagaagcggacgctcgttgctgaggccgattcggccgctgctgtacgtcggaacacccagctcggccaccgtgccactcccgagtcgactccacactcggtcggcctctgttcacgctcgggcgatggtaacagcaacggtgacagcttcaccgagggctggacctgcgtcgattgccccagcagtggttgacgcttccgacgtagctcctggatcgcgtaagcccagtggccttactaccctgttcttggagccgggtttcacggcacccggagcgtcggaatgctggcatctcatccaaaacgccagtgtccccctcgtctgcgaggacgacttggtcgcccccagttcagtggatggaatcgtggagtttggcttgtggacggatcctgctcaccccttccaagtgttgcgccagcttttcccagacgagccttgtttgatcgatacgacgggttttccatcctcggtggctatatcccgtcgtgcaactggtcgggctcttctcgttcgcctatggcggcagttccaggggtactcctaccactccaccgagaggggcgaccttggtttcgccttgtgggagcgtcgccactggattaggggtaaagctgtcaaggcgtatatcgacaacctcgccagcaccctcggtcagcgcaacgtgcaagtcctagcgcatcgacaagcgtggtccaagtaccaccgagagcgcaatgatcgtgcagatcgcttgcgagaccagatgctccacaaggtgtggaatggggccattacgtacgacggacaacctccacagcaccgcaccgaggttttgctggagccgtcgtacctgcaatactcgttcgaggcgatggagcgggtccccaataccgacgactgggcctccgaggtggcggacgtggatgcccgcgagccgtggcgtaactgtcggttccaagcgccggcagaccacccctacaacacggctttcgccccttgcaacgacgtcccgttgtttatccccaacggatcgactcgggaaaccgtggcgtcgtcggtcgtggtcgaatcttctctgcggacttcgatggtggtcgctccatgggtggccaaattcgcaaacgctcgtcgttctcgctctccaagccccgatgaggagacgaaggagtcgggtgaagcttcttccgccgccgggtcaagtctgggcgtgttggctcaggctgtgatggagattaggcctcgtcaggccccgctccagcttcaccgtttcgttcacgttcttttccaatgtcgaccgaagtccgtggcgctttaggcgacgctgcatgtgctatcccaatccaaaataacgtcatgttgttcgttccatttcataatctcttctcgcgtcaacgcacatcgcattcaatactcggtcgcggttcccagagcttcttctctgccctcgaccgctgtggctgcctcaaaccaggcttggttcgtagctgcggcagccgggcttcgtcttgtctccctgcaaggagatcgggcttatgctcgttgaagaccggacttgattcgcgggagaccgggcgtacttacgcgagctccgttgcgggtatgttttcgcatgacagcccaattttgacaactgtacacccggtctgctgcgggtatccggtgtcgacagcttgcatacccatttcatcatcaactccatactcaaccacgaagtcgagcgcacttgttcgtgctacttccatggcaatcactgcgtccgaagcctcggtcgccctcccatttgcttcatcatcacttgtttcgtctgttgagggtttgaccgaggcttgcttgcgtcttccgttgtccctggctccattccgatatctccattccatcgtgactcgttcacttaacacgtaacatacagattccagtaactttcttcgtctgtcactgcgagctggatagccctcgcaggcagttcaatcatcatctccagtagcctcgttcgtctgacatcgcgggctggattgcccccgcgagcagttcaatcctcgttggggcgcagaattactcctcgtcggccaccaggaccatttgcaaacgtcggtcgcttcgcttccggcgtaggtaatcgtacaggtggccaccgcacgagagattggacgctggttcccatgtcggctcgtcatagccgacccacttcaccttgaactctcggacggcccggtgagtgctcgttgacaacggtgtccggtcatcgaggatagcctcgacttcatactcaccgtccaggcgatccggctcaaaactgtcttcaggcagtaattcctcgtcgaagtcaagacgagtgtcttcggtgacctcacgagccaaacgaaccctcggtcggccttcgaactcgtccactgacttgagtcgtgaaacatgcaccaccgggtagaaccggtatccacttcggtcgggtaattccaactcatacgcaaattcgtcgaccttcttcttcacgcggaacggtccgtgccaccgatgggctagttgcttggtcagtcctggtcgaacccgctccatgtacagccacactctgctcccgggctgcaaagaaaacctcgttctcgtcactgcagctctactatggtcaggggaactcggtgcccggtcgaccgaggttctattctcgttgacgcctgccatggcttccttctccttcctgccaagcgacgcattgtgctcttcagctctccgagccttttgcgcggcttggtactccttgaccatcctcagggcgatttcctgctgtcggttgacctctcggcgccatgctagcgcgtcagtttggctaccgaagcctcgtttgagtgacaaggacattgccttgagcgtcgactgtgcatcccacccatgaacgagataaaacggagtttccttcctcgtcgtatcacgggagctattgatggcgaagatcagtctttcggcgatctcgtcccgatcctgctgtagtgggtctttagcgtatacgcggactgactgcatgatcgtcttcaccgatctctcctgctggccgttggcctgcgggcggtagctcagggtcgctctcgaccgagactgcatcatttccgcgaaggcttggaagacctcgctcataaatcgaggatcttggtcatgacggatcaaggacggtactccaaaacgtcggtagacacactcttcgaaagcttgcgcaacgagtaaggcggtagtatcagacatggctttgcccatcacgaatcccgtgaacgagcatttgaagagcaggatagccgtgttgccacggcgactcttcggtagcggtatcacgaagtccatagagactagttggaagggtctctcggctaggatgttccctggcgagtacccgcggaactgaggtcggctcttacttgaactccagtcagggcacgacttaacgtgtttctccacatcggcatactggccgatccagtaatagtctcttgccgctcgatgtagcctacgggtaataccttgatgaccgccttcaagtgagtcatgacagctttgcaggacctcttggatcatcgttgtgggcaccacgagtctcgtcttcaactcggcttgctcgccgtcacttgaacgacggctcgttcatgtgtaatatagcacatcgtcctcactcaacacaaattggtccgccattttccatgcatctcgtgctgctctgtatccaatcttcgcatcatctccccggagcactaccttcagattcgaccaccgtaactcttcatcttgagcggaggcgattctccttcggcgttcttcctgtactaccagcgggtcaatgtcttctgcgttcggtgggactggtgacgtctcggcacgcagcggtgaagcttctgcttcattctgagactcgttcggtacactattggcttctactcggtgagatgcgtctccctgatcggtgatcgagacttcatctgcaaaccggacgtgtttctcctttgctctcgtttgacgtctggtcatcacagctacgtgtccgggttcagtctcgttctgccgtctgcggtcggtttctcttcgcacaaaatcgaaaaaattcttgctacgaggtttggcagaagctatcacggcccatactgtgttggccgagggtatgtcctcgacgacgcaaccgtcagcagcctcgtagatgacttcagcgatacggttcagcttaatcagctctaatactcggtcgtccgacgataccaccgtagactccttgcactcgagagtctcgcttgcccgagagtcggccgcagcgttaaactctctcaccacatgcaggtacttcaccggccgaagcttggccgtgagttcttggtggtggctgagttgttgcagcaatgactccttccgacaggctatcacccctagggcttgctggatcgcgagcctcgagtcgccaacgacaactagatcgtcggcttcgtgctgtaatgcagcagagacgccgttgttcatcgcggtgtactcagtgaggttgaccgtggtgttctcgaggtaagcgctcgcaacaagcactactgtccacactggtagcttccatagtatccacgagcaactgccgtatccaccgttcttctcggtcttcgcagacccgtcaaacgacataacgaatcctcggtaggaccgcggtaggcgtgcgtagagcagatgcgggtagttggtgaccctcgtgtccggggtgtgaccaacgccagtgacttatccaagtcaacgaagttcgtcaagccggcttgaagtagccgagcaaacgaacagtcggtttcttcgactcgttcgaccaacaggtgcaacggcgacagcaagacggcgaactgggtagcccgaccgaacaatgtcttggacttgtggacccagtcgagtgtcgaaaaccgagtgtatacccggattcgctgtccaacgagttgagtataacacaccttcagtatcagcagaagcgcgaggacctctttctcggccgggtgataattcatctcagcatccttcaaaacacgtccgcagaagcgaacgtggtgtagtttgccctcgtgctcttgcatcaacgtggaacttagagcccactcgttggcgaacaacatggcatgcacctccttcttccggtcgaagtgtcgtagtatcggtgctgctgaaaccttctgttggagcatcgcgaagctgtgcttggccgcggtgaggtcagccccgagctggaagtcctcgtccttaagctggtacagcgctgctccatagaccgcgaagtcttggatgaagcgactgtaatagttgagtgccccaaggaaggactgcattcctttcctcgttgacgggaacggaagctcggccacccccagccagcttcttagcgtccggtcggataccttctgccgagacttcgtgggacaggaagtctaccttggactgcacaaagatgctcttcgtgaagttgatactaatacggcactcttcaaaccgtgccagcaatcggcctagcctcgccaagcacgactcgaaagtctcggcaccgaaacagatatcatccacgaatgaccggcgactgaatactggtagtcatcgggctccccgttggcgaacatgtcggtgatagggctgttgaccacttcggctacagctcccttaccaagcgagttgtctcggtcggcctcgaacttggtccggaatggctttgccgtgccagtcgaagcctcgttcaccccagcatgagcttccttgtcatgttcttcagctagatgcatgcgctccgagaatttaaaccatccccccgtcggttggacgaagccccaaagcgcgttgtcaatcatgcgttgatagatcatcggtgcgttcttcaggccgaaaggtatacgcaaccatacgaagtgccccagtgcgcagacgaaagcagagatcatccgagctcgttcggtcatcataatggctcagaagccgctagcggcgtcaagcgagcaaaaccacaagtacgcctccatgtccgtcagcaagtcatccaccaggggcatggcgtactccataatctcggtgatcgcattaacgagtttgtagtcgatacacaggcggatttccaccccattcttcttcaggacgatggcgattggcgacgcccatgggctgtccgagaaggagataagcccggccttcaacagacccttcagcaattcgtacagcttaccgaggaagcgaagcggggtccgccgagccttctgcttgattggcgcgtgcccctgtacattgatgtcacacacgaccccgtaggctggaggcggcagggcgttaccgctcgcaatcatgatattctcgtggctcttcagcacatcgaccaatgccgtctgcggcttcacgctgagttcgtcactctggacgtttgcctcgagtagtccagcgtcgtctccgacgcttcggttaggtccggcaagaacgccagctcttgcgcgtagtcggtaagctcaatctcgttcgcgacgtgctccgaaacgtcgttcacggtgtcattaccttcgccagacccttctgcaaccatggcatgcatgaccgagatataggtcgcctccagtagctgctcggggtcgtcgatcgcacttagatccgaatcatggaattcagtgtcggcgtcagcggtggaggttccggcttcagtaggagcgtcgttaggccctgggtcgtgttcaccccagtcgacttcgctactacacaccgcagccgacgtttcctctggcttcaggctggacgcagaggtccctgttggcaggacatcccatgtagttctctcggtcactgctaccacgtcgcggtcatcctccgaaccgtcgttcgtcacgctgtcaccaccactcagctcatcactggcttccgatgcctcaaccgaggcgtatgtcgctccctggccggtggagtcagcaccactgttcggattcacgggcaggcaacccgctcggctaggcggcgagtgtccgggtacgtccgagtcatacgacgcgctggcctcgtcgtccgaaccatcgttcgacccaccagcacgatccacatcggttgtatcagctcgagcgacatcgaccgagccttcactgaccctggggtcatcgtcgtagccatgtacatcgggtgacgagtactcatcatccaacggagcttgttgacggccttctggccatggcggtgcatccggtggcctcggcaggatctttcgcggcgtcgggtaagttcggcgctcgaccgcaggcggctgttcagccaaccattgctcgtagagacgacgttctcgtccttgcggagtctcatcacgactcgttgaataggccaacacctgccactctgtgtacttgttagaatccaacctcgcgtagccggtctcgcgcggtagttcaccatgcggtacccacagcaccacggagtcatgcttggcgcagtgtgccgctgtggtcgtaatattggtgagccgtatccacgtcggctgcccccgtcaaaacctccttacggtcggcacgagcttgcccatgcgtcgtacccacacatcgtactccgaacgaggtagccgctggcccagcagtcgaaactctcgccactcgcgaccgggtacgtataaatcctcgatcggcccacacgaaggctgcgtgccgtaaggttcgtcatcttcagcactctgcgactttagcagtggtaccatgacctcgtccggaaggcgtgcggtgccatgaaataaatccagccggattccagccgggatcatgaagtccatcccaaggatcacatccaccccggcactgtgatccattatccacatttcaaattcgtagacctgctcccacccgagggtgatcttgacgagcgcccgtcgccgggtctccatcacccctgggttgatgcagcggacttcgaaacttcttccgtggtcccggacttctcgcacacgtagccgcttggcgaagctggcagaaatcacgctaacattcgctccagtgtcaaggagtatcctcgttcgcgcgtcgtccactgcgccattgaccaaagccctcattcgcttcctcttggcgtatcgttgggacgaccaccaccccagtctctcaccgggcagtaatttcaccgcctgaacgaggttccgaggtggcccccttatctgggctagacttgtgatcaaagcctcggtcgggtgttcatcacgttcatcatcatcatcttcatcaataccaatcgcaacgagacttgcgtcccggttctctcgattttccgtcgatttcacacgttcattgttcttcaggtcgtcaggccgtttgctttcgcccgtgaacgcgaacagatagtccgcatcaacagcaggctcagctaactgtggcagcccgattgggaccaacccagtttcagttggcgggctgcctagtttaaatggcttccatacaccaggctttgcagctctggtgacagatccttcttgtcgaccttggacttcaggagcttggtgagctcgtggagtgcttcacacttcccagcgtcgtgcacctgtttgcacagtttgcaccgccggtagcagaagtgcaccgagtgggacgggcttccgcacgcggcacacggcccatagcgtcgaccatctcgtccacggttggacgggcctcctccgttcctgaagcgtcggttatcagaccgagcgaacgttccttcggctgcggccctgcgctcagcatcgttagcagcagcgacatgtccggtagacccatccgagtcgtaatcagcgtctgaatcctcgtccgagcgttggtcgtccaagtattggcgctcatcctcgaagtagtcctcgttcgcctcagcatcacgtcggggggggggcgtatggagcctcgttgcgtgcaccgaccgagcctccgacgttccattccgccatcacatcggccagcgcgtcaaccaaagtgatcgggactggtacggcggtccatcgcgtcggtcacggcgacggtcgtcttcactgcggtcgttgcggcgatcgttgtcacggcgacggtcgtcgtcactgcggtcgttgcggcggtcgttgtcacggcgacgtcgttcgcgacggtcttcgtcgtggtagcgtcgttcgcggcggtagccaccacgagaatcctcgttcgacctcgcatcgcgtcgacgtccatcatcttgactccgaaagcggcagaacgacgattgtcggttcaatttgcggtcacggtgacgcaggatgtcgttgatcatgtcttcgaggtcatggatgctcttgacccggacgtggcacagacggtcttctaaatttcggtcgtcacacgtgaccaagaagtggtccacgtggtccttcgcgtcacgaccaccgttttcgaattgcacaccggcgttgcgagcgtagccgttgagccggttgaggtagtcacaaacgtgtttcttgtcttctcgcttggccgagtagtaccgagccttcgccgactgggaaaacttcgagcaatagtacttgatgaacgcctcgctcagcaacttccacgtgcgtcttgtcttgcgtgggagctggcgacaccagtgcagggctccatccctgagcttaagttcgaacagcatacaccactcgttgggtggtgcatgcgttcccttcatctcatagatgaacgttcggagcagtgctcgctcttgtcgcgcgttccgtagaacggcttgatgttggcgagaggcaaatgcgtggcgatctcgagctttggggttgagctctggttgttggtcgcgcttacctcgcgcacctgacgtgtccattcgctcagtaggtccctttcgtagtagtcgggcccgaggtcgtcgtcgctatccgacgaatcatcttggaggtcgtaacgtcggccggtccgacgaccggtcgctccgcgcgtgccaggcgtggcgaatgaagcctcgttctccctagccagacgttcacaacggtccgtagatcgtggatgtaccatgtgcgagtcttgcatgtacggcgaggcttcgcccttggttgcaaagacaccgtcatcagtggctcccttccgaggggtcactggtagcgggaccgtcgacgggtctactgcctccgaggtcgaacgaagcatcgttgggcctcgcgaactgacgtccgccactccaaaggcattacgcagcttcttcctccacttggttaacgccgtggcagcggcggtcggcgtccaactcgcgagcgcagcctccgtggggagaatctggggttcgcaccccatagctcgcaggaggtccacagtattctgcgcaacgtgccgagtgctcgttgagttgatcggcgtagccaacgcccctccgaggtccatccagatggcctggcggacttgcttcggggagaacaactgcatccattcgctcttggtcttcatcaggtctaggcatcggtctaggaccttgttggccgccggagtatccccattgaggggaggacgagtgccaaccggcttggaggttgcccctcctaccgtcaccgagggtttgaagccctcggtggcgccgtcatccgcgtcgtaggcgggctcggggcccggcatgtccttgaacgtgtcggagaggtcgcgggtaatcgaccttgatcctccactgcgacctgccgacacaaccgcagcttccgaagtctcggacatcgctgtccggacatcccagtcatcatcttcgtcatcttttttggcgtccgaggaatcaatcgccgtgtcgtagctcaccgaacgctcgtcaatcgactccatccgatccgtcgttggggtcgagaatgagcttccggagcgcaccgaagtctcggtgcgcgttccactcgacttggccggcgttgctggtaccgctgacttgactcccttcgccatcttctctcttcttcttcttcttcttcttcgcttctcttcttcttcttcttcttcacttcgctcgttgggggtaaagacctacagcaaccaagacacacagaaggtcacaccaatcccgggtcgcggcaccagttgtggtgtggtaattccactaaaatcctcctctaccaaaaggtattagagacaccaacaacacgctaacccgcaaaggtaagcgcttattggatcaaaacctgaagaccaggaacgatcccttacaccgggtcggttgcaagcgcctctgtgcaccttaggttgtcttcggtcaacccaaaaacctgtaccactagccacgagcttaggctaggatactatgtagcgctttcgcgcaaccccactacagtccctcagaaaggaagggtaccggcgtgttaggccttaaacagggggaccaaggtaaaacctcggtaggtaggctaatacactcagggatactctaatcccacaaatatataccgaacgatactctaataccgttcctgcctctccggccacgccaactcttggcgctgtcatggaaactcttggtcaatgcacgataagctccccgacaggcatccacacgcagccgagcgtgtccaggcactacaataagctagctacacttaccgaagtcggacttgacccttgttggctttgggggaagactgtctttttattactgagttttctgaggccctgggggcctcgttctggccatcctatgatgagtcctatgtccctatacaaatatctagtgtgaacgatcgcaataaggcgattccggacacatcaaatgacgaccgcggctacactaataagtgcggccgaagtacgtaactaaatacatctgtacctaaaagtgggtaccatgaagcctcgttcggggttctatcaggacccgacgaggcttcggccactgcctgtcactctacccaggataatgtcatcatccaatcagaagcagccatctacgtctctcgcttcacctcgccttgatcgccccttgattgaacttgattgtcgggctggcgggtcaacagcgttggaaactgccactttccaataccacacgtatcataaccataggaggctgatacagtacatgaacatccaaatgtttattgcagcgtattagacatgatggcaatgcctaaaccccatcgttcttggagtcgtatggtttcggacaatgcgacgctcagagggtaggagcaattcacggctgtcccaaggacccattgacaatcatcggcgatcattgatcacgaatcacgaaggggtgtaatgtatacagtctgcacaccccgcagactcataaacaccaagcctataacggcgtagtgatctcgtttgtcagcctcaagactccagcgcattcccgattttgccagcaagaggcaaatgcgtctctaccagctcttcactctcgcggccaccgtcgcccaggccttggcagcatcctagtctacggtcacgacccgactgaatggctggttcaagtgttctgacctccccttctccgatgaaggaacctcaagcggccagtacaccaaaggcgttgccttctacaacgggttacacgagagttacccgaagggttacgaagtgggtacacactgtctaacctaaatccgtcggagaatcagtacacggcttcagagccactgattatgcatatgactagggttcactatgctagatagtgaaccggatacatttacaccgtaggcggcttggccgcgctaaagagaaatacattgagtttgagatttacactgaagagtctagggttgactcttggaatccgtagggtgtacggactcgtacgttctggtattagaacgggcgatcttaagctgagactctgcgagtctgttaagctttctctgacgcaaagctacggcagccccgctgcactaggtagcacttgtagtcaatccgacacctgcgtctgtatagactgaccgtctgtggagaatggagcagttcgctcacttgcccccgaaccagcaggatgcgcttaaaaagcttatgtccttgctgcgcccggagggtgtgacgcaacttgcgcagcaaggccccgacgcggtgaacatgcgtctcgaggcgttttcaagctacgagaaggctctgctagagcacctccagcagaggatggcgacggccgcggcgccccaagcgcccgcttcgtcatccgacgcgggaacaagacccaagccgctcatgttgagcgtgaagaccttcgaaggcaaggagggtgaaagcttgatgctttggacccgagaggatgagatggctatgagctcagctctactccggacggagtcgcagcgtgtggcactagctatctcgaagctcggtgggcgagcgagagagtgggcacttacgtctgggacgtcggtcgaggtggccttcccgacgtgggaccagctgaaacagcaattgtcccgagtgtttgctccgcctaacgaggctatcgcgtgcgctcacgcttcctggcgaccaggcagagcaagaaggagttgatggactatgtccaagagttgagaactctcattgctggcatgtctgcggaccccctgccggaagcagtcaccgttacggtgttcatggagggcctccgcactggcgttgccaggacggaggtgttccgaacccacccgagctcttttgaagaggctgtgagcgtcgcattgaatacggaacacacctttaagtcgtcgagacttgggtggaatgcatcttacgctagcgcgtcgagtggtccggaacccatgaacctcagctatgctgaagacgaagaagccaagcttcgtgctgctgagcagcgtcgcggtatccgcagatgcttcatctgtggtgacatccgtcaccttcgtgctgggtgtccgctgcgccatcagcgccagacttcgtcaagccgctcttcgagctcgagccagggctctggtttgtctcggggaaccgagaagtccccgagacaaaccagaagaactaggttctattgagccttggcgaggtggaggtcgacaggacttagccccgaagagagtcgtactctctaacacggaacgtgtatgcaagccaggcttgctagttgtccaagcttgggtgaagggcttcacgaagccatggacgattttgatcgattcgggagtgtcgggaaactacgcccggcgttctacgatggacggaagtcagctttatgctgaggcgctggtagcgcgcgggagtgatatcgtcactgttcgtctcgcgacgggcactcgtgtcacggtgcctaaggtccctgtggacttgggcgtgaagtttttggattttgatagcgtggaacgctgtctggtcttagacctcgattcgagatatgatctcatccttggtatggcgtggctagagggccacgagccttggatcgattggaggtcgaagacccctggtgctacgcacttctctcctggcggagcattggcgagtcatgaacccacctctgctaggaagtagtagcgcttctggcgtgagcactggatcgagtcggtcaatgtgctggacatcggagtctccgagttggtggacactgagtgtgtcgagaacgagcgttccgagcgttccgagcgtggctcgcggacggcagatggagcggcactaattccgctgtgcgggcgtgcgtctgagggcgacgccctgctgcgtgccagagacggcgcggtcggcacgatgccgaagaacaaggggctttgcccggatgaagatcgtggagtggcacgtcatccactgagtggaggctgcggattgtgcagcacttcgctgagtgtcggtaaagacactggagctcccctagagctgaacgaggtggtgacacctggcgtcgcgaattcacggagctcttcagggcggacggtctccatgatgaggaggcagcgccgcaaagcgctggctgcgagacgcaaggcgtctgtgatctcacgagtcgagaagggcgtgtcgggcggtgaggctccacgcgagagcgagcagctctatacactcgtgaatggagtgacgggcgacgtcgacggaggtatcaacctcgacgacttgccctcactgtctgctctactggagctggacgagttgtccttggccgagttcggcgaagccttgaatgctggagacttggctgaggtagtggtcatacgacccgaagaagagctgaactcatcctcgcttctggatgaagctgtcctgaaagtgaccaagaaggcgctgaatgcgcggagcggatcggcgatcctgaaggacccgtcggatcccttgtatcaagtggtaacggattaccaggacgtggtctcgaaggagccgccctcggggctacctccggatcgaggtgttcgacacgaaatcgatctcgttccgggaacgaagtactgcgtgacgaggcagtggcccttgccgaagcagcagtgtgacgtcattgacgcgttcttccgtgcgaagcatgaggcgggtatggtgcgtgagagtaagtctccacactctacgccgacgttccgtgtcagaaagccgagtggcaagtggcgtatcgtcaggcatcgtcaaactaggaagaatgaacataaattgggcgcacttcctaattaagcctctgccagcgtcctgtattaacaggatggctacataccaattgtagtgatctagactattggggcttccgttatgaactatacctggccatgaaccaattgctcttgattttagacagctttgttgtgactttcgcacgatcctaggttcagagatgtcttacacgcgtacgcacgtgtctactaaacgtagtgtagggagctgtcttcactatgctgaaacccggtgggattctatctatgactcctgcgagtttttgacactcaagcgcaactattataatcggttgtgctgcaaaaagaaaagggttgctcgctttcgatcagtttgaggtggatagtttgtctgtggtcacggatctcgcgcggccagccaagttatgatttgagtgactgcagtacaaacatgtcactgtatccgagcagtactgtactcggcccgcaataagctagtgacaacgctccagaaacgccctgatgcttaagtgaggtgaagactgagtgtaaggcgtcattgttttcgagtgaactttaatttaagagatgcgagctttaatttaagagatacgagacagtttggcttggttctcgtagttcgtgatggtgaacaaggatctattgacggggtcctgggcattacgttgtccgcccaggacacagtatacgccatggcgactcgtaaagaatctgctcttattactcatggcgcgtttgccgagttatttaacaggcatgaagaccgatttaccagacaggacggcgattcggtagtagggaaaatttgggcccagaattgtagcttgaaggaagagtgtcgagtcgatcgaaggtttggaaacaatgtcgaccgcctatttacgctcaaaacaaccgagacatggggagatctcgatcctgaaacgcatgaagagtgagcattggggtcaactcaccgatttctcgccagaagacgagctacatgttttgcagtacttggagctagtgaaagtagcgcacagcgcagtcgttgattaggcttcatccgcttcattaagtatcgagtagagatacatcctatattaagggtccccagccttccttcattgaggtaatataggcactaggacggatatcctagtttgacgaagcctgcgtatcgtgcatgctttcaacaagctgaatgccgctaccattcctgcgcagacgccgattcctcggaaggatgtgcttcagaacaacatgacacgatgtacgatgtacagtgcgctcgacttggtcgatgaatattaccaattgctcatgaggacgagcgacagtcgtctcactgcggtgagtactccaagcggcatgctctgggagtggttggtgatgccccaggagaaacgtacttcgatgacatctttgtccacagtcttgctgtacacggaaagactgatatggagaaccatgtggagcacctgcgtgctgtgcttgaatgcatgcgtcaaaacaagttgtatgccaacattgacaaacgcctcttcggagcggaagagatccccttcttagggtgctacattggaaagcgtggcctgagggccgacccggtcaaggtcaaggccattgttgactggccggttcccaagaaccagaaggatcttcgcaaatggcttgacttcgccaattacttgcacaagtacagcgagaactacgatgaaatggctcggccactctccaatctcctgaagaaggatgcggagtggtgttgggacaccgagcatcaagatgcgttcgcggccattaaggacagtctccttcatgcgtctattctgactttgccagaccccgctcgtccgtttagtgtcgtctgtgacgcctcagactttgccatcggctgtgcactgctgcaagcagacgtcgaggggcgcgagcgcgtggtggcgttcgaatctcgccagctgaagactgcggagaagaactatcctggccatgacaaagagctacttgcgatgaagtatgcgctcgtcaagttcagggtgcacctgttgggctctcagccgttcgtgatttacacggatcatgcgtcgttacgcactgcgactcagtcgcctcacctctcgcaaaggatggcccattggctgtccttcttcgcggagtacaacttcggggtgaattacaagcctgacaggtagaatgtccttgcggacgcgctgtcgcgcaggccggattatgagctggctcatgtaacgaccgtgacttcgtgtttaccggatttgatccgaacggcttatgccaaggacgacacctgtgtcgcgttgctgaacgctctggggagcaaggagtttcaagactcggacatggaattatcagcgcggctgcgcgcgcggctacaccgaaattccctcgatggtggcgtgttgttctacgacactggccccgaggatacgccccgtgtggtcgtccctcatgatgaggatctgaagtaccgcatcctttatgaggcacacgatacgccgctggccggtcatcttggccgtgagaagacctacagctcggtgagcacccactactggtggccgaagctgtacaagtggacgagcacttatgtgcgcacgtgcgagaggtgccagcgagtgaagtcgtcacctcataatgcagcgccgttggcgagtttgcctgttccttcgggctgttggcaatccatgagtatggactttgtgtttggcctgccggtggatgcggcgggcaacactggagtcgtggtcttcgtggaccgactgagcaagatggctcacattgcggctgtgccggacaccatcgatggtaaaggtacagcaacgctgttctttgacagagtgtttctacaacacggactccctgagtcgattatctcggaccgagacccccgcttaactgtcaacttctggagcgcggtctttgcggtgcttggcaccaagctggacatgtccgcggcggaccatccgtataccgatggtcagacagagcgcttgaatcgcgtcgtcgaggacgtgctccgcagcctttgcgccgagacaccgaagcgttggagcgccatgttgccactcgttgagtttgcgttcaacaacgccgtgcacgcctcgacaggctacacaccgttctacgtgaacagcttgtctcatccccgcgtcccgctgacgccgccacgtggtggcctcgggcttggtgggggaggagaagccggtttagctgatcggctagccgatgtcagcccggctactgttcgtaaacaggttgacgctttcttgtcgacgcgtctgagtgtcttacgacatgggcgtgacgcgatggctgagagccaagacaagcaaaaggaacatgcagataccaggggcagaggcaatgttaaaagttatgaggtcggggacctggtggtgcttaacgctaagaacctacctacacatgcagtgtcagccgtcttcaagacgaagttgtgcccgcgcttcatcggacctttcaaggttgtggccaggaagggccttgcgtacacgctcaatcttccgaagaatatctccggtgatcgcggttattcgaattgatacgaggacttgtacggccgcgtacggccaaccgcccttggggaatctcaacctctggtatgcagacaaagtcaaccaatcctttgaagtcgaaagtcctcactgcctctagtagtgtacttcacaaatatgttagagattatcacaacacacttacttacagttagtggtgtttgcaaacgcgtttgtatgtttgctgctctatcacttgcagatcgaatttatggctactgttacccgatgtcgaggggtcatccttacttttgagtacatttcgcggactttcgagtaatgagtaatgtgctcgaacttccgagtacgtacacttcatttaaactcgtgcgctgcgtcaacttgaaactattgactaaactctaaagacgtggctggctgaatggctggtacaagtgcgctgaccaccttctccgacgaaggaagctcaagcggagtgtttgatgtccgatgtgtttacagagctcaatgggacggcgaatatctacacgatggactaccgcagcacaggccgcagcacctttctggactgcgtcgccgcgcaggctactactaccggttttcccaatggtcaacagttcgacccatcggaggttccagcctgtgctcaggagctagaaaacgagtacggcgatctcgcttcattctcggtgacaagcgcagcaaccgacgtgacgaagttcatctcagggtacacgagcagcgccgataccatcatctacgtcaccggctatggcacgtggttggcggaacgtctaatgcatctggcccctcccaaggtgacggggtacgtcttggacggtattgctacgacctcaggctcgccggccgaaaagttcatgtacacttctacttgggacaccgactttggcgaagtcggcgaccagttcctagacctctgctcacgagacaaaacctggagcagtcgcttcaagaagtccaatactttgcccaaagtgctacagaagctgctcgcagagtttgacaagaatcccaactcgacgtgcgcaacgatcttgaccgacgggaccgtgatgccgtcggttaccctacgcagtacgctcagcacaatgctgatggacgatgagcaacggaaactcattccaccgctggtttaccgactgaatcggtgcaacaagagagacgtcgacgttctgaccaacttcgtagaggcgagtagtgctactacgaattccaagagtcaggacgactcgctctactcgccgctgctatattacctgctcaacttctcggaaatgtgggaaactccgtcgtcttcaatgcaagagatggaaaagcaagttgaaccccagacgccgtgtaagtaccagggctcgcaaacgatgctgaccgggtacccgtacccgcccgcccgggccagccagggctcaaggttttgttcggatggaccaactgttacatctcccgacacggttttaaaacatctaaagttaaacatttaagtaacgtaaattctcaaataataccccttacccgtatagtaccctctaaaacgtaacccagtgtgtatcccagggttgcaatgtttagccttgagaataggaccataacaggcggcccagcgttcgtttgtatgttaagtcgaacagctaccagctacgtctagcagatagcgacgacaacgacgtttgtgcgcacaacgagcagcaaccccgagcactaagcccacggcgagttctgctacgcgtccgcgattccgacgacgagatcgacggcgcccttggtttctcccgtgccgaggcgttagcgttagtgacggtttgatttgtttgactgcgtcagagccggcgaattctcaactgagccgttccgcgtcggctccacaccagcgcccaacgcctcctgcctatcgctcgtgcacccatttcgctcgctggactctagagtctagagcggtttcacgaacgccatttctttcactctgctgagcttggcttcatacatgaactatagcgagcgcccatcaacctgctggcgtgattcaacggctcgctggcgacttcgtgtgcttcgatgtacccacagctgcactgctcatcttcgaaccccagtctagtgtccgccacacgtgcactcttttgccgccattccttacacgacttcccctacattagagtcttccacgactctgccacctcgccacaggcgctcaaattcgttaacgcctacccaacggcgacgcctttacatccattgtggatccagatttacacccaaaccgcatggtccaacctcgatctctaagacataccgaccagttttgtttcggcggcgacgtcggcgaacttcagacacggttccatgccactttcgttgtatagcaaccggaggtggttcacgtcgacgacaacgcttcctggacgcgaaggtctacacgaccggttcgtcagttccatcccggtgatgaacgccgtcggtccgtggctcatcaacaccatgggcattatcattgaaggcacgacgattacgatcaccagctgtgctctccagcgttgccggcggtttgtcaacgacctcgtctccatctaactccaccaagatgtcgtttgctatcgtgaccaggagttcttcgggatcactacgaaactgctggtcacaatcaaatcttcatggtctccgtcctggtcgtggcgccgaactagcaggttatcgtaaccagcggagtcaatcactttacaggtccaatccaacgatgtttaaacttcggaccaggcggaggactgtaaaaccacgctaaatctccaggattgaactcgcgccgacttcgcaccttgcgattgtaaaaacgagcttgttgcagttgctctttcgcagtagcgcgacgtgccgccgataacgcgagctgcatcgactcaaccaacttgtcatggtattcttgcgcgggaccagcttgtgtcacttgatcccggcggagtagatcattcggcgagcgtagacgtcggcctagcataagttcatttggcgtaaagtgggtggtggagtggaccgccgagttgtaagcgtacagcgcgtaatcaacccattcatcccaatcttcttgagaatcatttacgaagaggctgacacaatccttccaagtccgatggaaacgctcgacgaggccaaccatttgtggtcggtatggtacagggtttagttgttgcgcttgtagcaatatagtcaatttgtccagcactttacccacgagtccagtcgagctgtcggtcagcagttcacgaaatacaccaaaacgcagaactacattcttcatgatgacatttgccacactctcagctgtgtggttctcgacgacagcagcaacggcgtatcgggtgacatactcgatagctgcaatgacatagcgatttcctcgcgtgctaatcgggaacgaaccggcgatatccagagcccagcgatctcccacatcaccgcccttcatacttcttagtggaggaataacttgtctcggtttcactgcggaggctccacaaatgctccggcagatatcagagcgttctttccattccagccttggagggctgcgggtgctcccacatctccgagtaagagatgaggtagaagagaagcggggagtagaaggcgtcgtcttgggatgatgcagtaacaaacgcgttgaagtataaaatgaactggctcaagacgtcggcgtgcttggcctcacagcgattcatgcggtaaacaactggtgggatgagtttccgtagctctccatactgccgagtgtgagcgtcaacgtggaattcgtgggcctgtccccggaccagattagaccaacttgaccagatgggaccagtttagaccagatgcctgtcccggtacatgtcccggtaggcccacgatgtcatgggggtgacaacccctttttatctagaaatttgtagtgaaaggttttgcttaaagcttccacaaaaccgaagaggcggcgaagagcaccaaggagatcggagctgcaggacgccaagctgcaccaccacgagggagtagacgcgacgatggcctgccaacaccgcggcatgccgactagcatgatggttgaaggctcccggtgcccatgacggtggtgatcatcgagtccgtggcacctaaacttggcaaagcgagaaaaaaaaactctcaagacacctcgctgaatgtacgcatacaatgccattcatcctgttaatttacgtatcttacgtatgagtgagtgcgtcaatctagcgccgtgataacgaggtgatccgagcgttcccagcaacatgccaagtcgctgaacggcatggcgccgcagccaccgaggacttcagcacgttcgagtcgctcatggacttcaacacgagtggtgcgccgttgacggccaaggagggcgcttcgtggcgggcgagcagttctacaatcacgagatgtacggcagtctgcgcaagggtggtgccgtcgacttgttgtccatggagtgtctgggcctcgtggccgccatcttcacgcccatgctgtcgtaccaggtgctggtcgtgcaggcgcagctcatgtacaacacgcagctgggattggtctcgtcgcagatcgtggcggtggagcgtctcatccagatgccagtggcaccgagtttcctcgtggggctgctcttcgattgctacccgatcatggggctccggtgcaagggctacatgatcttcggctgcatcttcaacgccgtcgcggtgttcagaatcgctggtgtgagtgcgtctttgggtgctgattcgacaagtaacagcatggtcatcctggcgctcgtgctcgtggcgctgtccagcgtaggctgcatcatcacttactctgcgtgcacacgcgcgtgatcaagtactcgcagcgcgaccgcggcgccatcccggcgtcgtacttgattttccgccgattcgtgttcatcttcacgtcggtgctgttgttcctggcgctggtcacgggctcggagccgtcaccaaggtgctgacacgctacacaagcaggaggagtcgattctgggctggtaccggcgtagcatccgcgacttgcagtacgagaagctggggagcggcatctgctttgaggtggcggacgaggaggtcaagaaggcctagcaccacgtgctggtcgagcatcacccggacatgacggcaagactgagaacgatcccaactacctaaccctgcagaaggcgtacagaagaagcgcgcgtacaagccgaattgcggcttcaatgactcctcaatccgctgcttcgcaacttccggaccgcgctgtatagcctcgcggatcttctgttggatcgtcaccagctgattgagttcacgctcgagccgcagacgcccaaccaaaacgctacaaatgaacctagacacagcatactacgtctattagctagatacttcccgtcgagactcgcattcactttcactactccgcagctttactcataagggcataagtgaatctcatgatagactcctcaagttctcggtcacgctaacaaaaactctaaactcacgcggcggcggcctccgcaaccctgcgggctgcggatgccggccgaataccggtcaagccacgtggccgaaggtaaaatctcgccgaatttagccacgtcctgcaaaagcgtcgcacacgtcgagtttgggtccttgtcaaagtctgacaccaagtcttgaagcgtcttcggcagcgtgtttggcttattgaagtaggtgctacaggtggcgtattgggcgcagagctccaggaaccgatcgcccacgataccgaaatccacgtcacgtttggacatgtagaaaaactcgttcgctggggcccctgatgttgctgcgataccgtccaagacgtaccccgtcaccttaggaggggccaggtgcatcactcgttccacaaaaattgtgccatagctggtgccgtacacaattgtatcggcgtcattggtgtgctccgggatgaaggtcgccaagtctgtggccaagcttgtaaccgagaaggcggcaaggtccccgtactcgtattctacatcgtgggcacaggcagggacctccgacgggtcgaagtctttaccgctcggagaccctgtggtattcgcttgtgccgcgacacattccagaaacgtactgcggccaacaccgcggtagtccatcgtatgtagatgttcgctgcgcctgctagctcagtgtggagagcaagcatcgacggctccactatgcagatattcaggctagtaaatggtacgcatactggtagagtgatcgaagcgagagctgttgcaaaatacttacacgcagaggaggaaaaacccggaccgccttgtaggagccaaacgttcgtggccgtcttggcgtcgccactggttgccggcatgcgcttcacgaacacgtcggtcgttgggtcggcaaactgtggcgtcatgagaccggggtgcgaacaaacaccttttggggtgacagcaaaacgagatggggcgccagcaaaaccaaacgggcgccagcaaacaaaaatcacgattttggggctccagcaaaacgatttgcggacgagaggtgagcaacaccttaaaactgggacaagcaccaaaaacttgtgtcagcaccataaaatacgtgggcagcaccatattgcacggcactgcaccagacaagtaacagggcagaccagcacatgaaacaggccagccgccaagctcattaagctcggcgttcagccaatcagcgcacagtcgctagaggcaacttgcaacgtgccgctggcggcgcagcattatgcagtcctgcaccactgcttcgctgataatccactatgcgggggctgcactcgctttatattggttagatctggataatccatacgaggaattagggaattggttattcgtcgtgccgcaaccggcatcccaagtcgcagggaaataccagcaagatcgactatcggtgttctgcgactcgagcgagcgtttggggctgccaacagctagatacataactttatagggaccatatacacacgacgcatgcgcgcatttcttctttaggcctcgcgtgggaccctcaatgcgagaaactcaccaccgcttgactgatcatcagacacttacctccgctatggcatgtaaatcgacgatattagctgttactgacctactaaaaaattgaagtaacatgggcacgtactaaggcgcttgttggcatttcttcgcatggaatacggctgagcacaacacatgcagatgcttcattgaggcgttagttttagctcctttgagcggagctggtacgaatcggcgcagttttcacagcctgaggcatctatgaagctcctgttctcacgcctcatgtgacgaccgacccaatctacctaggtagcttgcataaagaagaattcctcgcaagaaaggtagcgcgataagcaaggttacttcaagtagttttgttaggacactttaagtgaggtagctgcattttttaagacgactgggcttaccaaaaatgttgtgtgtccatggttgaatacacgaagcagggcatgaatacgtagctatcgctataacttgcgatttactttatttccgcgacagctaagcgctccctagattcactgaggcgaaggtgattaacctacagcatagtagctttaacgaattgtggtttactttgcatactgttggaattcaagtgtattcaactactatatggctagctttcggacaggatgtcgtgtgtggcggggttatgccttacaccaatagctagatcacatgactacagcctgtagtctcgccgcggcagttgccaccagctcttggtcctgctggctctgcttgacttcaccacgttagaggcttgtattacaattatgttacacttagggctacatgtacatatgaaacaattggcgggaacccgggtacccatcgggaccccggttcccccaaaactaccggtacacatgtatgagcaaatgtattgacgtgttggtctatgacctacatagaacgcagctaaagctcagtaggggaacggaaggttaattcaccttcgccctcgtcctttgtctctccacgaaaatccagacgcttgtcttgtgcagcggtacagtgctttccggtctcatcgctatcctcctgctcatgaaagataaacttggacatggtaaggtatgttatttggatctattcagcacctgtggcatattttgagggtagtccttcatcgacagcacttagagcatctccagcggtgggtcttatcctaagacgtaacagggtctttgagaccacaattttacagttgagacccgcgcagaccgacttacttccagcggtgagttctaaagcgagtcttataagtccattcccgcatgtgaaaattgcattcagtcttggtgcaatcttttaaatacggcgactcttcagttttgtatgggtggcattaagattgtggtcttattttaagactcgaaagccaatctatagtcccggtgaagttaaaacctgcaataggaccttctggtggaagccttaagtctcggccaagtcttaacagcgttacttttaggataaaactgtgtttgagaccaaccgctggagatgctctcaggtatgagggtttaacttgccccgagggtaccaatatggagaccaaaaataaaataaataattcgcgatttggtcggtatcatttgcgggaacccgggttcccgccaattgtttcatatgagctttagcctcgtacgagcttggatagcgtgaatctaggagtaggaatatcatcagtctgtaagtcactgctgcactaggccacagtctaaaactacccctgcgcgtatcgtgcgcttccaggatgcacgggtggggtgtcattcggttcgcgatatccttatctacatgttccatgcgagcagatggctcctgctcccatccaaaccctctaggacgcgcactcttagtgtgaacgcttcgcattaagttagcttaaatgttccatgcgagcaaatgagttctgtgctcgccacacacctcccagacgcgcgagcgcagtggcagatgctttgtaacatactatcctgtaaggtccatacgagtaaatcacttatgcgccggccgtacatctcttaagccccctaaagtagtgcctgaggatcgaaaatactcctggcgtggtagtccattaaggaaacataatctagctctttgcatttgttggaatacgccgcgagcttagtgatacacgcggatattgagctattcaccttgatttgtaactgatcaccacccgcaatccgggcagattcgcattaactcgcgccggcttaaagtgaatccacccagattcacattaactcgcgccgacttaatgtgaatctgggtggcttcacattacctcgcgccgtcttgatgcgaatctgggtgaattcactagtcggcgcgagttaatgtgaatctgcccggatttgtagtgattgtgagttggattagctactcagcagctaggcacgagaaccacggcgtactggggctggaatgtccgtaggtgacttctgccagaaatagccgtggggtggaaggcgtgctgcaatcaacgtcaaggtccttacagcgttattttctggttgcgactagaaacgtaccagtgagcacaagtaagtagaactacaactcaacgtacaaagtgttgtaattagaatgttcaagactaccgcgtgaccgccgcagagttggcttacaggtcgcccggcaacagtagctatagcgtgacctcatagttcaaaatcgcgacgaacgcgccgcgtccctcgtagaatcacaacagcttacaagattacttggggttcctgtacaactcactaacaattgagtcaaccagcagaatgaattacagttgatgaaaccgctggcacgctcaacccacccgcacaaagctatattactcgtagtgtggacgtattggctttggttatgatggagctggagggcatatcctttgtctacggactaaatcatgcatttactcacctttcggctctatacgataatatttttttaaagtgtaacttaaaagtaaccaacacgcgttggtgcgtgcgctttgacgagcaagactgtagatgccatgggttacccaaggtatctatgcgtagatgctatcattgctacgcgtcaaccgttataagacgttgcgatggcaattgaaatggcttccattcacatattcatcaccatttctaacatctgacatcgctgcttcacctgaattactacactagccgacattgtctcgattacatttatcaatgtttcaagacttatgtctagattaagcacatttctagctgatacttaatgggtatcatcacagctgggtacaggggtcatgacccgagtcactatcagatttgggacctagctatgatacttttctttttttacctgaactcattcgggacaacacagaaggtcgcaatatggggagggagtctggcatctcgatccactcctatgcggcagcaacggcagcttcggggcaggggcagcaggctgatgacagtgcggtgcagatgcagatagaagcgagcgaacgggctaccctacaggtaactctagatacgcgtccgatcaacacgaagagaaaggatgaaagctatcagactgagtttcagagttggtgcagtgaaaagcatttctgcgatggagctacggtcacaaaagggaagcttcaccttttcctgacggagcaggtggtaggccgagaatccaagaagaagaagggcacgttcgttggcggttcgactgtttgcggctaagtgaatgcaatcgtcgatctctacaaccaacaagtcgcgctgaagattaactcgaatgtccatccccggtctgctcaagtcaagcagctgataaagaatgtacaagcccaaacaacggaaacacagaaaaagaactaccaagatcgtggtgttggttcgttgctcgatgggtatcactctgaggagcaattccgacagatttgtgacacctttttcttttgggcgatctgcgtgggcgggcggcgtttctggtatcgcactttgggttgctacgcggggagaacgcacgtgacctcgagctggccgacatgttctctcaggtgctggatggagaaggatttcagacctgtatcgctctggtgatactaatccagcacggaaagacaaacacgtacgggaagctccagcacgtcggctatattcgcaacaaagatgttcacgtatgccctgttggtgcagttgcgttttacctattcgagcgctttcatatcgatttggagccctttcgtttctttcgtacagcaaaagattggtatgacgtcaagtttttgcgtggtcgcactcgtacgtttcgtacaacacccacaagaaaagattcgagagtgtgttcaatcgtctcggattaacgtttaacaacaagacgcacatcaatagacagcagggcgttcggcagcttgaacgctgcgatgtggacagctcccaaactcgtagacatggcagatgggggcaagacacaatggagggtgtatactcagctccgctcgcacgggaagctatgcgcgccttgtcagggcaccccgtacgttcgcggctgtactatctggaccgagcctgtgtggatcctccccaagacctgcagcggaagattttccctgattttgaaacatacaagaagaaaatattggatggagactgggaacaaatttggcagcacgtggatttatcgagttgctggagtacttacggatcgtcgtgcttgaggacgctgcgttcctgtatgagctcctgcccactactgttcaacagcatgaaatatttggtgaacagttccagcaataccgctctgaggcacttgccagggccaactcaactgagcaccccgtggagatgcaacttcaagttgcaatgcctttactcacgcagcaactaagtacacagcactccacagtcatggatacgatatcatcaggtcaccggcaactagtcaacttggtggaacactcgcagcagcaacttacctcgtttctccagggcgaggttactttccggttgcaacctgtgccggactcctcgggcagactccacagccagacgacagtacgaggtggtgacggagttgaacaatcaactgatacccaacagcagcaacaactgacaccgcctctcagctcatcggctgtaccacaatacagtatgagtcgtcaaacatcaacggtaacagagctgtgggttgaatggcatgaaggcttggccaaccgaccttctattgaatatctagagtcgacatttggggcaaaatggagatcatcagcaaaggaacgaagtatttctcgagacggttgtatgccatcaagtacgtacgcaagttggttgaggggggatgacagccgatgtagccatcgccaaggctgactctgaacgggggcgtcgaagcatagatggattctcgaagttactgcgcagcaaacaagttaattagtacccttcgtgtagcataacatcatactaataaaacaacttcttacctgactggaggcttgagtgtctaaattgaagggtcaatggcttctcatcttctggtgtccatgtcaccgaatccgataatgcgttggttagcctccaattaaaattcaccgacactagagggcctttacacccacccacttacatgctgtgctgctgtgttgcgcgctgggcctggtaagtcgaagtccagcgactcgggctcaggtaggctcagcaccacaaggtaggtgtgctcatacaagagtagtttgctctagtccacgtccagcctcatgctcgtggatacatgcacacctagtgagcttgtcctgcaggtcgagcggaagcgagccaaagctgcagcagcacctgcacgaacacctgcacgaagtgctatgtacgctttccctcacatacagcaactgaaacgtgatggggcacgacgatcaccttcttgtggggctgccgcagccgcttggtggctattggccacgtgtcggcgctcgtgatgtagaggacggtcccgctagcaaagcaaaatgaggtaggttagattcatcaccacggctacgaagagagagccgaaaagagtatgcatgcacagcaactcaccttccataacggacgtcgtacgcgtcgcggggtcgactggttctggaagagttgatgagaaaacgcgaatgttgagccaataggaacacagcaattaggtcatgacctgattttgatatttgccaggtaacacggggttaatgtggtgatacctacgaataccatgtgtctaggtcatgacctagtcgtgacttggccgctgatactttgatatagtacatcatagctcgttagtgcgtcacatcaaagagttattccactacgtaccaaatgccttatcgcatgctggttcagccacatgatcatgtttgcctagattaaatcgtatgtacagtatgtcccaacgcggcgaagtagtcacgtaggcttttgtacctaccgggacgagtttctgtgttcaacaagtacgtgtgggcacgtaaaacgtactaaagttgcctagttcggttcttgtttaataagttcagcatttcgagggtcagggaacctctggtaatagcaggtaactctagcaactagcagcggtgcgcagtatcagccgactaaatcgcaacaaactccaattcaaagacaaatctagcaactaagtcgaccgcttgagttattgtgcgtttggattcaagttagctcgagcggattcaggttaactcgagtactcgagttattgtgaatcttttcctgtggattcaacataactcgagcgctcgagttgttgtgaatctggtcaagttaatatgaatccactcgagctaaattgaatcccgatgcactcgaaagtgactatcaagcagttggtttaatctgcgttctaaatgcaagtttactttgcagaacaacttacgctgcattgaatgcgtgtagacaaggggtgttgcttgaggctgggaggacaaaggtggagtaatgggagataatgaattattgtactcattccttctgttccagtagccgttctcgccaaactcattaaccacttgactgtgtagatgttgggtcgagcaaatataaaaaaaatctgacgttatggaaatccttcatttgcaattcgcccacgaggtttagccaaatgaaattcaagttatcgtaagtttaaaaatcgtgaatcctactggactcgatgtagtttggctactacgagactcccaaccaagatcgatcaagccgacgtcgttgccatgaagccacgtgaactcgaaagtgtagtccgtgcctatcgaaacacaacgtatataccgttagttaagcaaccaaacctaaaccaatgatggtgcagtacgccgtaccgaagtgctggagggagatctactcacgcgtcatacgcgtgagtgaggaagtcgcgatggagcgggcgcgagcttctcaaacgtgaggtcactctcgaagttatcgaagggacacagatgaagtgcacctttgccagcaaaacgcgcggaatgtgaatatggagacgctgcgccccacttcctatttcctacgttaccgacagcttactagcattatagtttcaaccacatcagtttcagacgcatatttcctctttcagcttcttcttcttccagcttcagggacctccaccagagcagcttcacgaacagcgcttcttctttggaccgccattggcatctggcgccttctgcgattcgtttcccccgtggccatgcgccacgcagctcatagtcgtcgggggcagttgtgaatacacgtacgggcagtctgcaactcccatccagcaggaatagcagggtcaagtaccactttagttgccgaactgatcccaatggcaacgtcgtcgtaagtgttgactttcaacggctagaacgtgaagctgtagtaggaagtaggaacgtctgtagttggagctggcgtagcatatttgtagcaaagacagcaagcaaaagataaagacagcaatgcagtcgcagcatgcaatctgtgttgtctggtttcttagagtctccggtctcatttacgtatggatggtgtgtcacaatgctgatgtcgtcggaatgttttctgtggtacgagcaactttttttggacgaattaatgtctgtgaggctctccatgcagctcttctacactccacgacaaaaagatatggacaccaccaaaagtggctgtaacttcgtcaatttttatcgttttaaggtgcggtttggactagagttgcagaacacgctgataaagatctgcacgttgctaacacgcgcgcttttgcgcttcttcaggtagctcacatacaaatcactggttctgcccaggtgacaaaacttatggacagctaatccccatacaaaatcctatattaaccaaaaccccttacaaatgatacgacttggacgttgtatggggcgacaaaggaacccatgatttctacactctaccttagtactgagccatatatcatcgaccaacagtttagaatggagaagacaatcgtatatccaagagatagcagcatacagagctacaaattggcactaaactaggatgcaactgaatgtgcctcgcaaatcatcagataatacatggtagccaccactcgaaatttcagtcgcttactacttgctcagttttgtgcgatggtcgatgtatttattacaggttactaaacacaccttctagtacacgataataccatcagatctttgtccaacgtcgcgagtatcgccgtgaggctggttcctttgtcgccccatacaacgtccaagtcgtatcatttgtaaggggttttggttaatataggattttgtatggggattagctgtccataagttttgtcacctgggcagaaccagtgatttgtatgtgagctacctgaagaagcgcaaaagcgcgcgttatagcaacgtgcagatctttatcagcgtgttctgcaactctagtccaaaccgcaccttaaaacgataaaaattgacgaagttacagccacttttggtggtgtccatatctttttgtcgtggagtgtagctgtcctcccaggataattaatactggtacactgactaccgtaattagtctcactcagactattttgtgtgatcacacaaattagagtggctaaatacgaagctaacgttagactaatttaggtatggagcaaatagtcacactcagactaattatgacatcacctaaaatagtatcacaagacaagtcaagatatctctgcagactggagtaattggaaaaaaacggcgttgtacattctttgagttaagcgatgaaggagccattgactaaatgatatcgacaaattggattgtatcgcacgaggggaccaaaaaagcaacccctgattttctagataagcgagtaaaggcagcaataacataaaaaatctgaaaagatgaaaaattgtattgtagaagttgttaagcggtatctactcatcacctgtacggggtagatgctgtaaagtgctgacctgctgtgccgaacgcgatgacgatgcattcccccgttcttctgttgttccagcctagggtgcttgagccgcttcttcgccggatgcattatcgatccctccttcctgtgacccatgatcagcttcgttggtaacaccaggccgattttgctcgatggcttgcctcctttgatgggctattgcggcaacaataggagatgccgaaatctcacaggcagctaaagacctggtctggtccttggactcgcacgtagggcacaagatgtgctgtccgaagccttcggctccaaccggcttgccacaaaatgggtgcatatgcacggagcaagatgggcaaacatgcacaggaccaacgtcacctccgcagctgccacaaggcgccaatgtgcttcgtaacgtactcattgtacgcgtgtgccgcctgttgaacttgtgtcgaagtgcagtcgttccaagagcagcggatgcaacctatttgagcgagatactatttttgaattgagactatttttgaaccgcttcaacttttgctcaccataattagtctaatgaaaacgtagtgtgactaattttgaacatagactaattttgcactcaaactaattacggtatccagtgtactgatgtacatgggcgttagtgtcagatgcattactgtacggcccgtacacctcccgtactacgggaggctgttgctgtaagagggggtgcgccgtctacgtattttgctcgcgcccagttttgcgttttgctgccccatctggattttgttggcgcacttttcactggcgtcattcattccaggctttggttggcgaccaatccttggcacatcctcaagctatgcctgcagcctgagcgtcgcattgtgtgaaaccatacggctccgaagacatgtaagagatacagtacgctagtagcgatgaacatgtgaaggcttgaccagtccaaacaggattctgcaacaattgattggtgttgaataacgtgcttgccggatacatatcacagataagactatatagatagaacagaaatttcgaaggacaaaaaaagaaaactttcctaaggtaaggtacgatccttacccttaacttaaccccaacactttttgtcctaggatctaggaccaaaactcacttaagtacgccgtatttagcagggtttgtcctagaaccagcaaaaaggactttgtggttgtattggaggaaataagatccaggtaagtacgatggtgtcatgtataacaaatacaacaactgttcgagtggtgaagccctatactgaactcaagtcattttaaggaatttgtcctagaatccaggacaaaagagaaatataatatgttattaatgacacctttcaactgtagcttttgccgttatgaacaatggtggacactacgcatagcaaaggattaaaaaaggaatcaaggcttctctccgtaccaataagatggcttatctttcaaaaacaacgccagcgtaagcttctaacttttggtccttgtttttgtccttgatttggcgggtgttggggttaaggttttcatgtcatcacaataataacatccttacatatctccaacattataatgtacagtaaccgtatgttcaactcgtacaataggttcacagacagccattgtttttgttgtggtcgaaaaatcgggacgggtgctatcatccattcgttatagaattgtgttgatgagtcgacaaggtgtatacattcattacaatcacaatgctctgtactgtatcctcggcacagccttgaactgtgcctgctgatgcagcgtcgcattgccggagagtcttccgactcggaatccgagctgtaggtaccgaataaccttagttatgggatacaaccatgtacgcgccatggggctggtcacgctggctggtgctggttatcggtccggtgagcgaaggggtaggcgaactactcggttttgactctgtctgctttttgtccaaaatgaacaaaacataggcactttactcaaaacccgagaaccacctcggcgattgagttctcgggttcttggcgaattggctaggttttgttcattttggacaaaaggcagacagtcaaaaccgagtagttcgcctatcccttcgctcaccggaccgagaaccagcaccagccagcctgaccagccccttagtttgaagagattatggttggtgtaaagaagaagacctccgcgtgcaagtaagctcccgacaagtgcaaagagcttcgactcttttttgttcaagataaaaagtaaaaaatgtataactccgcaaacatgtaagccagattcacaacccactaacaaacagtttgcaaacactagtgttagctataatttacagttagtgcttgtgcgaacactagtatctagcagtagaaaagaaaagctactactagcgagtccactgactgtttttgatacaatctaacgaacatttcgtcttctaagagcacagaaccagtctggtggccgcaaattgtgttccgaatagcttgaagattcggagaggtaaggccgaatgcgtattggttccttcgctctcgggaactttttttctgacttctgagaaagagctttctgaaacccgaggagaattgtgcctgactgctacagtgactatttttgtactcaactatacattacatatggtcacatgtggaatgtacttcgagtccaattcgggtccaatcgtcgcacccttcgctgtggtacggggctcaacgggaccctactcaagtcgattgcggaacgcgccaccccgctacgatccggtgtgcatcctgatcgcatataaaggtaaaatttacttcgcagtgtgatttctccggcttaagcgccgaccattgccgattccctccgctccagttgcgaccggcctctctacggcctcaccaggcttcgcagggttggcgtcgcagcgtttcctcacaaatcaacggctgcaagagcgtccatcgctgaagtacatgtacctgcagcagtttgaagggtttactcaattttctgagaagaatatgctttcctcagagatcagcagcgtttcctcatttataaggcttcatctaccaaaaaatagcaaaatataagaaggcaaaccttgctcgagatcttttggataatgcaacgtctatctatgctattatctagaattcattcacccctatcgttttttttacttcatccgcagactagcgcacccggttcggtgtttattactgattcacagcggtttaacatacttccatatagggcaccgcagtctgttgtattatttgaaattatggaaatataataacgtgttgtaaattgtgttcttgagtagtatcttgtgtgttaccgttgtcgtgttatcgttgagtgtgctgtcccaaagatgagcttacctttgatcgaggagcacgttttattttcgttattgacgctgtcacgacttgcttatcattcctgcaagaaaaaagtccgtctatattactgtatccgtacaccatatgggatgcggatggtacaaactccttacatggatgtacagtagtacagcacatgtactgtagtcggcaaagcttgcaaggttacaaggggaagtactcacccaacataaaataggcattgctccgggagggtacacaggtcggcgaatattttcatggacgatgatagcggataacaattgagtaaatcccaaagttgtgttgtttttaatccttttaaggattttaaaagagcactaccagccgaactctctagttgattctaatgtgggcatctactgcgcctgcttcgcagccgcagcatctgcccgggaataacactctggtcagcgtccaatggctgcgttgacgccagcaacgagagagctatttcattcagtttgcaggtaaggtatactgtgctcatttagtactatgttgtgtgctaacgatcagacgagagagctagcggaacgaaggagagatgcatggtgcgctgatcttgaccttttaacttgagggtaaattgcggaatgagaaatgcgttaatgtaccaagtccttggaagtgggcgcttcaacacaggtaaagaaagcctaattcaaacgaacgatgctcggttggtttggcgagagacacgaggttgggcatcttcggctaagtgattgagtattgagcaaattgacatgtaaaaaatgcagcctgcagctagacaagtcatattggtcatcttcagctaagcttggtcgattatggcgcaaattgatacgccttcagcgaggccatgacgctctcatagtgtactggagcttccataactgttttgaacgcaggttttggtaaagaatgaacgattagtataaacctttggtaaataatgtgcataaacattagtatttatcgacgggtacccgattccggcagatattagcttaaacattacaattaagaaagagggacccggtttggtacccggttttggaaagttacaagttttttgccggggccaagcacaggtcttcgacctgtgaaataagcttaactgcacagttgctctatagcgttggtgatgtaccgaatgcttatggaagcgcattagacatgatggaaatgtccaaagcccatcgttctcggagccgtattgtttcggacgatgcgacgctcagtcggcaggcacagttcaaggctgtgccaaggactcgttggcagtgaaagcccagcatcgtgaaacaggaagggatgaatacggttctgtacaccccgcaactcaaaaacaccaaaccaaaccatcgttaacactccagctcatttccgaatttgccaactagcggcaaatgcgtctcttccagttcttcgcgctcgcggccgtcgtcgcccaggcctcggcagcatccaagtctaccgtcaagacccgcctgaatggctggttcaagtgcaccgacttcactttctccgacgaaggaagctcgaccgggcagtacaccgagtgcgctaccttcaatgcgcccttgtgctaccctggaatctgtaagacgccaaagttcgccgatccaaccatcgacgtgttcgtgaagcgcatgccggccaccaacgccgacctaaaaaccgctacgaacgtttggtttctggaaggaggccccacttcatccactgccagtaagtgtgttccgtattatttcgtcacttttgtcatttttctctgactttggctgtgactatcgtttccagtggaatcttctatgattgacgtgctcaactaactaaacggcactgcgaatatgtacactatggactaccgcagtcttggtcgcagcaattatctcgactgtattgcctcgcaggctactaccacgggatctccgtccggtaaggccttcgactcgtcagaagttccggcttgtgctcaggaactgcaacataagtacggtgacctcgctgccttcttggtgacaagctccgccacggatttggcgatcttcatcgccaagtatacgaacagtgccaataccatcttgtatggtggcagctacgggacactgtttgtggagcgtgtgatgcacttgaaccccccgaaggtaacggggtacgttttggatggcgtcgccacagcgtcgggggcttcagcggacaagttcttctacatgtccaaacgtgacgttgattttggtatcgtcggcgaccgcttcttggcgctgtgcgcggaagacgctacgtgtagcagtcacttcaagaagcccaacacgctgccgacagcccttcgaggcttggtgaaggacttcggcaaagacccaaactcgacttgtgcgagtcttttgaaggacgtgaaaaattacggcgaggttccaccttcggctacccttacgctcatgcttggcacgatgctgatggatgatgcgctacggaagctcattcctccggtcgtttaccgcatgaaacgttgtgactcgaatgacgctgaggttctgcgccaattcatcgcacactacaacacgtacgccggcgcaacctcccaagacggcgcgttcgactcccctcttctttccaacctcatcgattactcggagagttgggagcgcccgcagcctgcgcaggctgaaatggaaaagcgattcacgaacgccctgacttctgctggagcatacgcgcagtctgaggagtactgtgccttccccaaggaaaagtccaaggcgtgcgacgaattcaacgtcggcaactaccctgcgaaacccatcacctacaaacgcgaccagtactggaacaagaccgccacgatccccagccaggccagcgtgctgctcctcagtagcaaactggacgctcagacgttgcacgagtacgccgaggcgttgctggagacgctggatggagaccaaaaggagatggtcaccttcaacacctctatccacggtgccctcgtgtggacctctttggattcgggtagtacttgtggcgcgaagatcctggcttcgtatgtgaagaacaacggcaagctcaaggggctggacaagtcctgcgtggacgagatgcccgcgttcaaactgacgctccccgtcgaagatcagaccatgtacttcagcaccgatgacgtgtatgatggcaccttcaactccagtctggggcagtaatgtcgatgacccccgggaagtgatcgacaagcgcgaatacggtagacaccattccatcaaccaagtgagcggctaccacacaaaaaaaaatcacgaaaaaaactgtccactccttcatgacttgtgtttttgcacggaactccgtgtgtttttgcagtgggcatactgagcgcggcgctcagagcgccagagcggcgatggtcccgtgcagggcgcgtggatactggaaccaagtccgaacggcaacttgtgtttttcgagggaaatccgagtgctttcgaagagcactcggagacgcgcaaaacgctacaatgcccagaaatgcaagactccgtccttctcctcgttcgtccctctcctcgttctcttcgtcctcgggttgtgccgccgtcttcttctcccaatacctcgctttcgccctctggcgggcttttttgcggcaatcctcacatagctgaagaagccgcccccaggcttggccttcgcggagttcccgcattggctgcagatgccgggttggcgtggacgctgtcgccgtcggatcccgtgcgaggcgttgaagtccagcctggcccacggcgagcgagttgttgccgtctgggaagaatccataggataataaacatttgtccgctgtgaggtggactcggatattgggatagcagtggaaacatcagctgctgtcggccatgaactttgtgtcgactcagtttcaggcttcctcgtgtttgtccctgcgacgcggtgcatcttgactggctccacagctctagctcgtatcttgcgacgatagcggaatcggcactgcagagttcgtacagcagtcaggaaacggaagtacttcctccgctgggaggtcatcagcaggaagctcagcactttttgagccgacgttaagtgctttttgtctctgtcgatggactttgtagcggaacgcgatctgcagtgtccgaactgcgtgccgaaaacgcaagtatcgcctccgtatcattagactgaggacagtgtaaaatactttcctgcacgcttgacgtcgccgatcaatgcgaacagtctccagtgacgttcccgttgaaagcctaggtacctctgctggtacaatccaaagtggttcacccgtaagcgtcccaacacctgcaaatacctgaaggtgtttgatagcatcagtcagatccatgcgcttagaaggctcaaaggcgcataaggtctacacaaaactccattcgacatcgctcgtgaactgttgcggtcgaggaataaactgccgatgccgaagatgatccatgacagcagcgtcggggagatagactccccatggcacgtcgtaggtcaaggcctccaccacacacatcccaaacgagtacacgcccgactcaaatgttgggatctggctgttgcagccaagacattccggagctctccaccggataacgcctccagagcccgtaggcttcgaccccgacgagacaaacctaaacccaaagtccgtcagtttggcgactccttcgccactcaccaggatctggttgcatttgaggtctccatggacaatcccattctggtgcagatactccagtcccaaggccgcctcgagcagcttcttccacgtgagcgtccgtccgtccgccttcttcttgtccaggtaatccaccaaattgcctttcgcagcctcctcacagatgaaaaagcacggctggcagtcgtaacaagcaccgaagaagttcacaatgtgtgggtgacgagctctgtgccagatccgcgcctctcgcaggaacgccttcttctcccgcggcgaggacactgtcacgcacttgatgacgactttcgagcctcgccaaacccctcgatagacctgtccgaacgaacctgaagcaaagggtttggcttgacgctgaacttcgtggcgtggaacaaaccactctgggatctcgggaattggggcgccggacatccgtgctatgcgctttgaggctgcttctaggagttcctgagattgggcgctgtatctcgccttgtgacggagactttcgctgttcagcagcaatagagctccggtctgtgaggtcgtgtccggcaactctcgggacaaatcggacgagttggattcccatgaatttttgagtcggttctccacttccagaacggcgtcgtcccagcgttctctccagtttgtaaggatcgagatggactgcgccggcgctaagggggttatcacttcgtcaatctcgttgtggaagccgcgtagcagccccaggatcgttcgagtgctggccagcctgacaacggacgtctgcttcgtgtgctgaaccagtgccaacactgcccgggcatcttctgtctcttgatgccgagtccggcgcgcttctcgtcgctcttgctctgggcggctcggcattctctgcacttgctgtacagcccgccgtcggggttttcagcgcaatctcgcttgaggcactgcatgcacttcccaggctctctcgactggatagcctcgcttgagccgcgcatttttccctgcatgcagcacacgcggagtgcttgtcgcttgcaggtttcttcttgttgcagtggccgcacctgccttcctcctgtctctgataatacttgaactgtttcttgcgccggcacgcgatgcacgtgctttcaccgtcggcgagagctccagccctgcacttcatacagatggcggccagcttcagcctgatgtaatcggccgcgttggccttgcgggccttctccttcttctcttcctcgatgatggcgcccccttcctcgtccacgaactccccgagaaccagctcttcgggcgcgagctcctcgctaaccagctcttcgggggcgaattcctcgctggcctgggcggccgccagctgcttagcggccgtgacgagggcctcctgctccctgacccactcgtcgtcgatctccatgaacaggacctccttggcctgtgactcttcaagattcttccgaactacatagcatcgagcaacaggttaacaacagtgcacaaacaaagagttaacatcacaagttacctgcatcaaacatgaagtggtaggtgatgctctcataggacaggtttaatccttggaaggaagggttgacggatccactcgaggacatgacatcgtccacaataatcaactgcaataacagagttaacataagacaaccaatgcaactttaagagagagcattacttgccttgacgtgttgaaccctgctccgctccttcggcacgaggattctgatcttggcccctttcttctgctcggccagcagcttcttcatgagcggcagctcaaacgttgccatcgtctgcctccagtcgagcatgagcgtgatgcaaaccttcaactccagcagcaccaagaggcgccccagccccccgaggtccgttaacgagaacgcctcaatgcgcagcgtgtgtcgcggtagctggaatcggaacatatagtccgggcagaacttggggttttcacgcgagtagtccgtccgttcaggcggcaacgccaccaccttcttgtagatggagtagaacgtagacggcttgatgttgaaccggaaggcgcactgcgccagggtcagatccggctccttggcgagcagcttctggagctccatgttgacccggatgggctcgtgcttgggctccggggcgggcccgctcttgctccatggctcgcccttcacgtacttctggtagatcttctgcactgtgcggtagtcgcgagtcggctgcagatgagcggccacttccttcaagtcgctcggcgtgggggcccgctcggcgcggatgaggggcatgagcttccgggtgattttgacagtgctccgccggaaggacgcggggcgcgaactgcacgcgcttcttactggaccgctagcccgatccagtgctcaccttgcgcttgcctgccatctttgcgctccagggaaaattcgattgtgaaggcacaatggactgcgccatgtacaaccagacaatgggcgagttctcgctcggcctcttcgacgttccctcggagaaatactggatcggtgatgtgagcttctcaatgagcatttccagttcagtaaagtcaccgcatgtacaggccagcagagatggcgatattagcgaaggacaacagagccaggaaaaacaccaagaacgggtcgttctgatcaaagctcttgaattccacaccctccgcagcttcaagcgcgcatgctaggaaatccacgaccacctcgacgcccaattggagaccgctcatagacctcatctggcgctcttgcaacgctgccgttgtgtcttcagaaccagcggcttcatctcctaacagcaggctgaactggaactgcggatgatcgtggtagaagaagagaatcccgtacgagcagccgatcgctatgtactccgcatacatgtcggaatagatttctgcagcgtggagcactcgacgcttcttccggagttcttccgcttctctgcgtgccttcagggatgcggttccacttctcactcgcttggtggactccgttttaggtgcaggtgccacttgcactgcatttgtgcgtgtggtgctggctgtcaatcttggaggtgcgctatcgaaggtggagaaccgatccctgggaatcggagcaccgcgcgtctgcctctgcacgatgaatgacttggcagctcgaaccattatctcgaacgtagccagcagtacagttcccgcgacggagacgtttgtgcttgcttgtcgaagcagtagcattcgcacttgggtatcgacgaggattgtcggggtcgccacgagaattaccatgactctgcgtgacacgggccgtcgtgtagcgatcaaaatatgcttcgccagctcttgtagtagcaacttgaggacgatgctggtactggcaaacgccagtagttcccactggccttggagggaaacaaactggctgattgcgtgcacgtacacgatagcaatgagcacgaatagcatcactgggagatttcgggcataaatcctcaggaatcgacgaaacggcggcttccagtgtcgacggtggtgggtttgctggatcatgacgtcgctgtgatattttgtcgatgcttgtgtcttcgaggaaggtttgggcgcttgtccggtggcaatcagtccgcgcactgtttcagtctgaaagatatgccgcacgaacacgtcagcgatcaccatgatgtagaacccccagaaagccgcaatgtacacgcacggcttaaaccgatgccacgatgcagatacgatcgagtacatcgcaaagtcaccacccacaacaatgacagaagacagcacgagatgtggtccaacgcggacaaggagcttggccgtgcactgtagaatattcaacctgtgagtcaccgatttggtcgtgctaggttgactgacaaactgctccggtagaagcttcgtagccatcagaatgaccacacacatggagaacacgccgtagaaccacgcaatattggcagcactgaagttcgcgtacgactgctgccctggaggtagccccgtgaaaacattccccacggtgaagcagtagctgaacagccagcccacagcgatgcagagcaaagagttgcgcaggacgagtgctagcgtctccaatgcgagccttagaggtggaatgcacgcattgggcacagaccataaacccatcttgcttcgttcccctgctcacgagtttagcatcagaacatgcaaacaatgtcagcaactcactcaccagaaataggtagacgtaattggactgacgtacaagtaccgaaattacagatatgagaggcatcattggtccccagttgtccgtccgctagtcagccttttcgcagcagggacggcgcccattgaggtttgacgtcaatatattaccactacagtatagcgcaggagtaatttagtcgctacttcgagtatcgccgaagtgagatactcgaccgcgtatcgctacggtgagaatacccgacggtagtacaactactcgcgagcatcgtcgacgaatacgatagactgcgtcgtatccttatactttgccttggccccaccatttatcacacgacgatagccggtggagccccgacctgttcgcttagcgacaactccagtcgtaaagtacaagaagacgcctgccgccacgaacaccagcagactcatattccagccgagaggcagccccgcgctgagctgctcggccagcagctcggactctatagagaacgtcaccttgcgttgcagcgcctccaggtacaaaaaggcgcccgtgagccacgccaccaactccggtgggctgctacgccccgcgttcgccccggatccatgccgcgacaaaactggttgcttctcaaaatgctcaacgaagtggatgcgctcatcgtcgtcttggacccccatccgctggaggagcacaatggtgtagcacagatcgagacacagctccctctcgttttccatggtagaaccgagcgcggacgatcccgttgcagacagctgagatgacgctgcgccagccactacgtccttatacggcagcgcgcaaatactcttggcagcatcctggagagctggaagtgttggcgtgggcagctgcagctgagctaaattattctcctcctgtttgttaccggcatactccaatactcgattcgcagagatcacggcttctctcagcactcccgaggcgtaaaacgatccaaagccttgaggctgcggagcgctgcccaggaagcaaaagttttgggacgggcagttggtattgctcgaggctacgtgcgactctagcagcgtcatgcacttgacagcgtcaccagagcctcccaccgtcacgttcacaccttccaccactgttgtttgacctgctagatagcacgggtgctgcagcgtgtccgcgtctgccatgtcggcctgctgctgcttcaactcgagcttcaccaccgcctgccgcacttggctccgactgaatcctgggtactcgcgcccgtagaagtcgctcgtgttgagcgccacgttgacctgtcgctgtctcttgctgcgtctccagcgctcgcgcacgtcgaacaccatctcggccgcgtccgcgtccgactcggacgtcgttgtccccgcgcgtcctccagcgtccacgtggagcacgccgaagacttccacctgtccaggactgagcgacggcgccacgtggcccgaaaagtagttggtccccaccactgaaaagtagcggcgccacgcgggcgtcaccacgcgcaggtcgccactggacgtgacgctgtcggcgtcggcgtcgggcgccggcacgttaagcgcgaaggggaagcggccgtcgctgcgcgcgcggtcccggagctggtccagacgtcgcgtgacgcgcgcggcggccgcggtcttggctccgccctgcgtcctgaagttcgcccccagctccgactcggccaggacgaagtgcgcgtagcacagcgccggatccacgcgcggcttgagccactcggccgcctgctcgagcgcgggccacagcgtctggtacgcgtcctccgcgcgcttcttctcgtcctgcgcgtctgcaggcgcggcgtcctgcagcaccgaggccagcgccggcgactggtcgtacacgttgatgttgtcctgctcgtaagcgttctgcagcgccagcacgcgcgtgtgcgtccgcgccgccaccacgaacacgcgacaatgcgcgcgggcaggcggcggcatgggcgcgccctgcgccgcggcgctgcgacggacggcggcctgcgcgtgcagcagcatcgccgccgccagcagcagcaagacgcggaggagctcccacatgtagtgagtgaatcagaatgagagcggagcgtgaacatggatcaatttggtgtggcgtacacgagtggtctccctctattagcataacggctcctctcagtctccaagccaagtcaagccgacgatgggcgagtcgtcggggccgcgcttcctgctgcgcgcgtgcgtgttcctgctggtgctgatcggcagcctggtgcagctcgtgttcttcgcgctgctgccgcagatccagctgcacacggagttctgcaacgcgacgctggcctcgcgctcgctgctggcgcccacgcccacgagcgccgagctggcgccgcccatgaagctgctgttccagtcgctgtacgtgtcgccgcgcgagctggcgctgcagcagaaggaggaggagcggaggcgcaacgaggccacggcgcaggaacccaagcagaccatgcgcggcaagaagaagccgcaggacgccgacggactggacgcgcgtggccagggcgagacgttccaggccgagacgctggccgagaaccacgcgctgcgcctcaagctactggccgagagggaggaggaggccgagcgcgagcgccagatgagtctgccgcccggcttcttcctgcagacgcgcggccagggccacgaggccatcagctccaagtccgcctactgcatcaacgtggtcacgcccagcgactcgcccggcgtgctgctggactttgagctgtacctgaacgcgcttccctcggccaggcccgtgtacgcgtacaggggcaacggtgagcaggagagcgacagctacagcgactgcgacggtcaggccgtcaagcgtctggacatgcccccgtccgtgatcgacatttacctcgagcgacaccccgtggacaggaagtactacccggacttccacgcccccaaggagaagaccatctggatgatgcagaacgtcgagttcttcgaccgccacgagctggccaacccgacggtcggcgtcatgatggtcaagaaccgcatcggcctcaagaaagtgctcgagtacaggcatcgacaccaactctcgtactcggtcttctacaccaagcacacgagccgcgacttgtaccagccggcggtgcagcgcgactggacgtcgttcctgcatctcgcaggctggagtccgttcaagaacacgcgcgtgattctgcaggcgtgggcgctgcatcccgagtggccccagctgatcatccgagtgattaaggcggatttgtgcgcgtggatcgaggagcagttcggaacgaaggagacgtggcggctgcagaatgtggactacgcgtgtggatcggtgcctgctgaagagaaggacaggttgcagaacgagattggcctccacctgtgcccgagcgagacggaagggttcggccactacatcaacgaggctcgcagtgtcggcgcgcttatcctgacgacgaacgtgccgccgatgaacgagctggtggacgagaagagcggcgtgctagtaggggagccgcacccgtggtggtggcagacaaagggagacttatttatgccgctggcgcaagtggacgtcgccgacatcgagcgaggggtggagcagattctgctgctctccatagaggagcgtcaacggatgggccggcggtctcgagccaagttcctcgaggaccgcgcctacttcctcaacgctatgactgcactggaagagagcctctgccaggacgagatccggatcgagaaattacagccctatctgtactagtgacccgcgcgcgtcgcgggactgctcgacgatgacgtcgagctcggatagatagagatatagcacctgcctggcagtctagcttgtaagtagtagcatagttatccccctatgaccctgtccggccttgcctgccatgtcgggcgagcaaggtcgtgagtaccagacagatcacgcacttgatagaaccagcttccctcaattgactcattgcccaaatgcggcaaagctaaacgtcgacttgaaaacaaattcacaccacttggtagattatgatcgtcatatccgggctcaacacccccctccgcacgagagtctctcgagcttatacatacatgtaaggtacctatcagaacacgcttgaagatcattcacacgaagacgactacgctttgtcttggataactccagctgccttcagctcgcgtctgcgctggaaccgtgcccgcaatacgcctcggaacaagtcgacggcagctttggagagagccacggctaccatggggttctccgtctcaagacgcacgaggtttggagcgatgacgatggcgagttggtccacacccatgtggttgtgcggttggtactcggccacgaaggccagcaggtcggctaaccacagcacgatgctgcgctccaggtcgcccagcagactcagcacctcgagctcagcgttgtcagcggacgcgagacgctccatctcgcctgcgggtatttcgtgcagaatgggcacgggcagctcccggaaccagagcttgatgaggtcggccagcactcggacgtcgtgcttggctcctcggaaggcgccgcagttgatgtcgatcatggcttggtcgcgctcggccttgctgggcgattctcggaagatgtgcggcgtcagatacccctgcttggcaacgaagtgctgctgcagcatgaccagcacggccgggaccctctcgtcgtagcccggcacggccacgcgcggcacctgtcggaacggcagcttgaagtgctggttgagtatttttaccgggtcgttgctgccgacggggtccagactgccgaacatgctcgagaggctcagacttccgggcggggccgagctcgtgcgcgtccgtttggcgcggcgcctgggcttgagcaccggcgatgccgcgtccagcgcgcagactgtgtcggcgcggctccgctccaggacgcccgacacgaggtagtcggcgaagttgtcggggatgccctcgaacctggcctcctggaagttgtagtggatgtgcacgtcgtgcttgaagccgtagggcgagccgatctccaggaacgcggcgaagtcctgctcgccgtccgcctgcggggcgtgcgacggggacgacggcgagccgctgtcggccttgaccgtcgcgtgttcagggagctggatgttcagcatggcggtggcgtgtgcctcttgtcgggcttgtggccgggactcgtccgctcggattgtgagccgcgggatctcgtcgggcttaagctgagcacacgcagacacacacggcgaacatctgaataagattccggcatggcgcgcgcgatcttagcggcggcgtgaaagggcgcggtacctgtgcagtgctgcagtgcaggcggcaattggctggcgggggggcgtccggccgcggtctctttgcttgctttaggtcgggtggccacctttctcagctcgcgcgctcgctcgctcttgagttgacggcgcaaaatggtatgttggccgagtcgaacggtgggctgctggccgctgctgctggccgccggcagtcttctcgggagaagaagccggcaagcgcggcggaaggcgggccgtttcgaaaccaccaggaatagcctgcaatagcagacactcgttaaagcaacttgggtttgggcaacttcgtgcaacttcattttgggcaacttcgggcaccttgggcaacttcgtgcaacttcgagtttaccctattgtgaaattcacgtggatcttcacgtgacggcctcatgcgccaattcgcgccgtcggccacagatgtgcgcgcaacttcctgcagcgcgctccacacgatcatgtacgcctagccgctgctgcagccgcactgacatgtagctctgatctaaccctgcttgcgatgctatggcagggataacgcttcaacacagtcgtaacgcgggggttggtgaatgcgcgcttgcaaattcactcgctttctcggcacgtttggataacagagacttgactgcgtgcagcgcaacgacaatggtcctgtagcgagttgttcgtcgatgagcacgtggcacacattccgacgcgttgtgataaggccttaaatgcagcggcgcgaaggcaaagacgcattaaggggactgttatcggtggcgctgatctgatgtggctcatgtgcatggcatattgcacggcaccacgtcgccttttgagcacaagtgacccgcagtggtaagtaatcggatggacagtgtgcgttcgttcctctattgccagactttcgggcatgtacgtccacaaatgtttgccgtctaactgctgtttttatatagagtatggtttgtggctgttaaaaaacgtccatgcgccaacatattgcgtagctcagaggcgagaggactcgagattcgagcgttgagcggtgcgcaaggtctactgggcaaggagcttagtggctcactacgacctcgacccagttggagcgctggatgttgatgaagctgcgattgggcacgttcagctcctgactcacggtctccatcaggatcgacgccgtctacagcagcagcagtagcaacagcaacggcaaagacgctcattagccaagtatcgctggttttggatgcctctaccttcacctaacgacgaagcaccggaaaatttgggcagagatacgataacacgagataccaaaagaaatatgtatgagaactatcgcgttaaggctcttctgtaagtttaaagtggctgaagattataccgtcctttaaaactatgtagagaggtgggtcggtggtgtgaacgttagcgtgtgagccaagcaaccacgacaaaatgcatcagcactgacacgggggccgatgatcccaacgcgaactatgtaaggtaggacatttttttactgcatgtatttactactagccttgttatgttttgaacggtatcaaaatgccactgcggccatacagtcatcgttgcttagtcacggcaacaagggcaacctgcaggtatggtatactgtacttggacgtttattctaggtccactactagaagagcggaaactgtgaagcatggaatttcaggactagcatgcaacgcagagatacgtggacatcgagaatacttcatcagtgttccacaagtactcgtcacgtagaagatagcgaactatctacttcaagtacttaagttttaattatgtatcccgaagattgagcttggagatacttctatcattaatggatacctgaaacggggtttcatggaatagtgatcctgtcactattccgggatggctacatcggtcactcccctggatagtgacccaagtggcctcagagccaacagatacattttgtatgacacaaactatagagaacttaggatttgtatgcaggccaaatctgtaccaacctataaatacagtcagtcttagatctaccgcttttcaagtcaagtcgtccccttcagaccagggacacgtgaacggctgttcacttggagtttgtatactcctgcttcctctgttaagaagtgctgtgtgccccgtcacacttggtagcacttgtagtcaatcctacgcctacgcgggtagattggactacctgaatcctctgtggtctcatcgagtgagccaagatggatcgtacggagtttccccatctgaacgactcgcagtacgagtccgttcgtaagatggcaggcatctttgggacagatgccctgcgtagcttagcggcggcgacgccggctgagcaggttgagcgtatcaacgcgttcgacacctacgagcgagggctcatcgcccacgttcaagggctgcaggccactgcggccgcgccgatgccggtgcaaccgaagccctgtggctctaggggtcgctggcagaagccgcgccccaggaaccaggggaacgccggacaccagtaggggcggggcgccctactggggaaacactaagtcttcatgaggggcgtgcgggtggcgcacgccatggggacttagcccctgagagtctctgaactctagaagcggagaagggcagcggtgggctgcttgtggtgcacgcgagtgtaccgggatacgatcatcccttgagaatcttgatcgactctggggcgtccaagaactttgcgcgccgccagactgtcgcacgcaatcgcgacaagtacgccgatgcgctacgaggcagaaaaggcaacgggctggtctcggtaagactggccgacggtacggtggtagaagtacctcgggtccacatggacctcactgtcaagttcgaggacttcgacagcacggagccgttcttggttctagacatggacaagtacgacttgatccttggcatgccgtggctggagaaacacgagtcttggatcgactggcgcggcaaggccagcggggccagccgtcccccacgctctgacagagctttggtcagtcatgttcccacctctgccagcagctggggcgcccgcgagggccgccagggcgcagcagcatctaatgagttcttggggtccgtcgagactgacgacgactccgacctggccggacaaggcctgagagtggaggtgccggacagcacctaccaggtggtaacgtaggtccacacgcgggtaacgaagtaccgcaggcagcaagggctgctggagaaggcgccgctggtgtggcgtgggtaaccaagttccacgcgaggtcactcagaccgaaactgatgcggaaggcactgcaggcgcttccgatgtgggtaacatagttccacaggaggtcactcagaccataactgatgcgggagtcgctggaagcgctcctggtgtgggtaaccaagttccacacggcgaggtgggtaacatagttccacccagcaaggcgggtaaccaagttccgctcaagaacaaggcgagtaaccaagttccgctcaaggacaaggtgggtaacgtagttccgcacgagatcgagaagatcggtggtgccgtcaaggcggcgccacgagacgaagacacccgagggtcacgtcgtaagccgggcctagtcgtgtggccgacgacgccagtcgccagcgactccgagcctccagccaaggctccagccgccgaagagtgttatcacatcttcgacggcgtgaccggtagtcgggtcaagacaggagctgtcgagcttacagctctgcccgaggtttcggagttgctgaaccttgaggagctcgccatggaggacttcttggccgagctaaaggccggggagatcgcagagttggttctcctccgaccggagtccacgtcggccgagttgaactcgtcctcggtcatggaccaggcagtcctggaggagttccagagacagcgcgcgtcgcgcatgggctctgagattcttaagaacccccaggacccggtgtaccccttggtgaaggagtttgaggacgtggtgtccaaggatccaccgtccaatctccctccggacaggggaatcaggcacgagatcgatctcgtgccgggcacgaagtactgcgtcacgaggcaatggcctcttccccgggagcagtgtgaagtcattgatgccttctttgccgccaaggcgaaggcaggcatggtgcgggagtcgaagtccccgcactcgacgcctaccttctgtgttcgcaaaccgaacgaaaagtggcgtctggttcatgcttataacaagctgaacagcgcgacagtgcctgcgcagacaccgatcccgcgcaaggacgtgttgctcaacaacatgaccggctgcacgctgtaaagcgcgctggacctggtggacggatactaccagatcctgatgcgcgagagcgacatcccactcacggctgtgagcacgccgagcggtatgctctgggagtggctggtcatgcctcaggggctttctaacgccccggcaacgttcaatcgcttggtcacacaactgtttcgacctttgcgtgcgttcacacagacgtactttgacggcatcttcgtccacagccgtgccgaggcaggccagacggccatggaggtgcatctccagcacctttgacgtgtgttcgaagtcatgcgggccaacaagctgtacgccaacatcgacaagtgtgtgtttgcagctgaggagatcaaagtcctgggctgcttcgtcagcagcgccggggacccggagaaggtaaaaaccatcgcggcttggccgccacctcggtcgcagaaggacctacgacagtggttgggcctcgccaactacctgcacaagtatagtgcaggctacgccgagctggcacggcccttgtcggatctcctgaagaaggatgtcgactggcgctgggagcgtcgccatcaagatgcttttaacgacatcaaagcgagcttacagcgcgcgccagtcctggcattgccggacgagacgaagcctttcagcgtagtctgtgatgcgtctgactacgcaattggctgtgcgctattgcaggccgacgatgaaggccgcgaacgggccatctcgttccagtccaggcagctcaaggcagccgaacggaactatccagtccacgacaaggagctacttgccatgaagtacgctcttgttaagtttcgagtgcgcctcctgggctcgacgccctttgtcgtttatacagaccacgcgtccttgcggactgccgtcaacacgccgcatctctcacagcggatggcgcgttggctgtcattcttcgcggaatacaacttccgtgtcgagtacaaaccgggcaagttgaacgtgcttgccgacgcgctgtcgcgccgacccgactacaagcttgctcatattagtcgggtcacgacggatctgtatgatcgcatcaggctggggtaccgagacgatgccagtctcgaacctcttgtgcggttcttgggcgctggctcggaagccaaggccgagtggctcacgccccgacaacgtgcaaggctgcaccgctatgagtgggctgacggtttgctccactatagggtcgagcccgaggatcctccccgtattgtcgtgcccaacgacgaggatctcaagtacgacatcctgatggaggcgcacgacgctccatccagtggccatctcggccgtgagaagacgtacgcgtctgtctcgcagatgttttggtggcgtcacatgtacaagtgggtcgccacctacttccgtacgtgcgagaggtgccagcgcgtgaagcctgccggtcacgcctcggcaccattgcagagcctgccggtcccagcggactgctggaagtcgatgagtctcgactttggcttcggacttccggccgatgaccgtggcaacactggcgttgttgccttcgtgtgccgcctgagcaagatggtccactttgctccagttcgtgacaccgtcactggcgacgaggtcgctcgtctgttcatggactgtgtcttccgacaccacgggctgcccgagaccattgtctctgatcgagacccgcggttcaccgctacgttctggcagacgctgtttcgccttctcggcacacgactgtcgatgtcgacggcggaccacccgcagacggatggccagacggagcgcgtcaatcgcgtgctcgaagacacgctccgcagtatctgcgcggagatgccccactcttgggctgatcgcttgcccatggttgagttcgcactcaacaatgcggtacatgcatcgacgggctttacgcccttttacctgaacgggttgcgccaccctcaggtgccgctcacattacgaggcagtcccggggcttcgggcctaagtgggggagaggctcggaaaaccttttcctcccaagtctcggacgtgagtccagccaccttgcggaagcaactgtcctcgtttgccgaaggcaggctgaacataatcagcagggtgcgagacaccatggcgcaagcccaagataaactgaaggagtactctgaccgaaatggaagaggaaacatgaacgtgtttaaggttggggatttagttctcctagatactagaaacctaccgctaaacactgttagctcggtcgagagcaacaagctgaagcaccgcttcattggacccttcacggtcctcagccggcatggcgaggcgtacaccatagacttgcccaagtcgatgacgactcacccgacgttttacgtgggtcgtcttaagaggtaccatgaccctctggctctggctgccccgcaggaagcggtgggtggcccggtggagaagagcgcagctcctcgaagcgcgtcgtcgagtcgcggtaaggtgcctgatacgcgcgctggtcgtaagacggcgcggcgtacatcggagcagcatacgcaggggccccgtacgagcgctgaccaaactgggcctgatacgagtggggctgctgctgctccggatacggcgcgtggccatgaagctcggcccgaaggccagcaagctggtttcgcagcgagtcgtaagacgacaggtcggctcgacgatccacacggccatggagactgcgagtttcttgatagagcgaggcaacatcctcacggagccgctccacggcaccaggctgaccagcacgagcggcagcctcgccaccaaagccgacgccaagcgcgatctcgaggacgtacacacggtcccggagaagacgaatctcctcttgctgcagggccaccacctgactcggggccccagcatacggctgcgtcgcctcaggctcgtagccatggccgtgcgaggccaccgccgaccctccttgatcgtaatgggcagatccaccaccacgtggaacgagtcgtccgggagcggcggctccatggcaagcgccagctgctcgtgaagtggaggggttaccctgagtcggataactcgtgggagcccgttgagcagctgcccgaaggctgttgcgatttgggacgagaagcagcggcagcttcgtaagtagtccttggcttcttggccggtacccggggcacggtagcagacgtagtcgcaccacgcccacgctcttcacgagctttggctctcgcctcttgcttcagctcgtccattttcgagtggagcttgcgcttgctcacgagttgagcgaactcgatgcggagctcgcgcacgtccaggattgcggacagagtgcgatcatcacggagttctttgaactcttggtcggaataccctttgcgctggacgtagcgccagaagaggtcttccaccacgcaccaggtcatgttgtcattcggcttgacccagtggaaaccccacacaggatggagtccacccttgttctccggcttcttgcgaagcgtggtgaactccttcagtgtgagcttgtgtggtgctagtagcacacaccgggcgacttcaacgtcgccaagaaagagtggctctttctcaacaagagcacgctcataggaacccctcgaggtgtacccgccgataaggccacgaggagccgagagcttctccaacagcgctggcgcaccagtgccaggctcgagcaggaagtagccctgcgggtacgtggcatccccgcctgaagaagactcgatggcagtcgtggcagtcggctgcctggcatacgcacccgagctagcagcgtggtattgctgctgctgctcgtcgaggttgttggagagctccttgggctcgtggacggcaccctcctcgtcctcagactccgagtcgatgaacagcttggagctggagccgcgaggcgacctggaagctgaacgcttcttcgccttgtcctcggcggcgttcgcagcggcagccgctttcgacgcttgggcacgctcacgaccttgtctcagcgtcagatgcttggatgccagcacctccttgggcttggagcccgcgtagctcggcgacttctcggccacgaccccagcgtcggccatggcgacttcgtcgtgcgactgcttgctctcgcctgagccggactcggcgtcctccgcctccttctctgacaaggcctttgcgtcggccgaggcgttggtcatgtcgcctgccgccagctccgtgccttcggcagcgtgcgtgctgccctccgagacgttctcgtcgtcgggtgaactctcaccggagtactggaccatcgtgcagtcaaagacggcggcttcccagtcgcgagccgggcttttatggtcccgaggactctcctccttgccttgcgcggcgtcaggagactttctccgagccccggcctgacggccactcttcggcgtgctgctacgagagctcaccacctccttggccgccttcgtggcctccatcagcacggacgactcgtccttggccttggccgccctggtcttcggccctacggcccgcggtttcggaggtgctttcgcactgcgcgcactgcgctttggaggcatgcttccggtcgacgtggagaccctgcggcttgctcggcgatgcgccagttgctctgtgaggcccgggagccgaggcgccagagctcgcgccgttgtcgatggatttcgactttgcgagtgaaatgtgagtcgccggcgtaacctcgctctgattggtcgataagatcgaatctaagtgggggaggatgtaacggggttacatggaatagtgatcctgtcactattccgggatggctacatcggtcactcccctggatagtgacccaagtggcctcagagccaacagatacattttgtatgacacaaactatagggaacttaggatttgtatgcaggccaaatctgtaccaacctataactgcattcagtcttagatcgcccgcttttcaagtcaagtcgtccccttcagaccagggacacgtgagcggctgttcacttggagtttgtatactcctgcttcctctgttaagaagtgctgtgtgccccgtcacaatacctgtctaactcctccaatgtgtaagctatataaattatacagcaacaaactgtttgtgagcactagcgtttgcttaagttcgtgctccactctgccccactctaagaaagtaattgtcacgactccaccaaaaagttgcgcaactttctcagtgatgatgtggatcatgctgcgttcatcaaacacaacacctagtgtcctcgcctagaggagcccccattatgtttaaacatagtaaagttaagatagtcgctatggtctcagttcctagcttgcttcccagccacatcgtcagtgatggtcccgctggaagtagcgcgtaccacacgaaaaaggcagtgcgaatcatttgtttatctgtgtagctttatgattgtgacagaacacgagtaactttacagtgtgaataccatcgatgcaaagccttacctctgacttggcattcaagtcagcaataagaggtcgaccttcgcttgaaagggttacctgggctgaactgagctgtgttggctcaggtcgaagtaaaagatgttcactccgcccctatataatttagtgtcctttattcaacagcttgcctagcagtataggcagcgtgaacgcactctgctgaatggtgcatgtagttgctgttgaagttgcagagcctactcgctagtgcaaaaattcagtattgcaaatgttcgggtttcgtcgaagttgcccaaaggtgctgaaggtgcttgaagttgcacgaagttgctcaaacgaaggtgctcaaaggtgcgcaaaggtgcacgaagttgcgcacctttgggcaactttttcgaccaaggtgcccgaagttgcacgaagttgctgaaggtgcccaaacccaagttgctttaacgagagccgcagtagcaatgggatatcatgggccttttccgcttgacgcgcacgccacgctgtgtcacagcgcgccgacattgcgcggcgcgcggcttgcacggccagccttgggcccaggcatgcagccagccgctattgctaccaggaccgccaagcgcgcggcgcgctcgagggtatcgtacccactatccttcgggccatgataggcctactgacttgggtgcaggattggccgttacgacggagccttgaagttccccgattcgcggcctgcgattggccagtccacttcaacgtcgccaaggccgttacaggcgtgctttggtgttccgagacgccttggttggtggccagcggcggagatgaccaacggagatgacaacggggccggctgctgggcagccacgagtgagccgagctgagcgccgctcgtgggcgttgggctcctgcccgttgccgatgactagcgctgctgagtttgtcacctacagcgtccacgacatgactgatactggtgctcctctgcacatttgtccgatcattactttagcaggccttgaggcacaggtagccgagtgcatttccagagggaatgatgtctacaatgcaagcaaaacgcgcaggcctgggagcttatcatcttacttctaagctttatcgcttccgcatcgagtccgagatgctcgggttgaatgtaaagtcggcgaacgtggagctcagcaccatggactggtgcgtgcacacgctgtccaccacgggctcggacgtaaactcggcgtcgaagttgcccacgtcgagctcgtcctgcaccaccgggtgccacggcggcgtcacctcacgccgcatcagcgcgtcccaggagacaccggcaaagaacgggtggtcacgcagctcttgcgcgccgcgcgagccgaggcgctccgtcgggttgaacgtgagcagcccgcagatcagcgacgcggcctcggggggcatctcagcaggcatcatcgtgcccacggagccaggagtcatgatcttcttcaccataatttcgcggttgtcgtcgaagaatggatgcgtgccggtgagcatctcgtagaggaacacgccgagcgaccaccagtcgaccgcgtatccgtatttctgcatattgtacacctcgggggccagatactcggggctacccacaagcgtctgcgcgcccttgtccgaaaccacgttgagcttcgacagtccaaaatctgtaatgcgcaggtggccagaggcttcgactagaatgttttccggcttgagatcgcgatacgccaccttcagccggtgaagatgctccagtcccagcaccaattcagccgcgtagaaccgagataaatcgtacgagaagccatcatccgacatgtggtggaagagttctccgccagagcaatagtcagtcacgagataaagcttgtccttagtctggaacgagtagcgcaaccgcgcgatgaaagggtggtcaatctcttcgagaatgagccgctccgtcttgatgtgctcttccaatccgtgacgaaccacgttcttcttgcgaagcaccttcatagcgtacacaacatgcgtgtccttcttgcggacgaggaaaaccttcccgatggaccccttgccgatcaccttaatcaagtcaaagtcacttacagaaacgccgtgagagtggtggctggagttgctgctgcgactgctagcaatcgacgcgcgcattgctgaagaagaactcgcgtcggtgtccaatgacgatcggcgagcagttttcctgtggtgcggagactcactcgcgttcgcacccatcgccgtactgagtcggcgactctgttttcgaggcttcaacgagtccagacgatggcggatgacgtttccgagccacgatcgagtcttggcttctgactccgtaataaactgcgccgcaccgcagccacgatcacgcgcagcgacgaagtacgtgaacgtcgtctccagcgagaggctgatagtgcgcgccttgttgctactgttacgctttgagagcgccgatgcagaagctgggggcatcttaccatcccctgatgctgtaaggtctccaacagataaacaactgcacgaaagtttttcctcttcggccgggatatgtccacccgccgagatctgagcgtcgcccttgaagttgatcgcgcgctgcttcaagaactgagccacagtaggagacgtggttgacgggtccaagcggtacgcgccctcggcaaacacaagcgcattcacgcgcttgacaacttgttcctcgcgcttctggatgagcgtcagcaccgacttggcaccgaaggagtacgccaaaaagtacacgttgcgagcctgtgcgcgagagataatgttatcccacacatacaacatgtgctcgtccggggacgagttgccgcggatggggaatgtgtcgttcccgatggtcacattgttggtcgatggattcagcacggccacggcaaagttggttgcagtagcgcgacgcatcaccggcagcatcgaaccgagctccagcccttcctgaatcagcagatctcgactccaaataccaggctgcgctccgcgaccgccgttcacgaccaccagcaagttggcgttgctgcgccagtccgatgtcaggaatatactggagcgagcatccttcggctcgtccggtcgcagatccagcgggacgcgcgcctgcttgaacgccaactcggccagcatctccatctggatgtggaagatggcggccttcacgatatcgtccagctcgcccgcgcgccgctcgtcgctcatgagctcgtagacggcctggttcgtgcggcagtgacgcagcgtgcccgcgtcgtcgaagtagtagtccagctcctccagcgactcgagctggtctgtgagcgcgatgctgcctcgggcgagtgcgtcggcgtcgctgggccccgtgacgctgctggcgctgctgtcaccgaacttttgcctctgcagccgcacggcgtcgtccgcgttcatgcacaggatgtactgcttgctgtcctcgcagctggccgggtccgagacctgctccagcgtggccgcgtgcagcacgacgcagccctccagcagccccggcgggcgctgctccacctccatgtcgtcgtcattgcagctctgtagatcgcagccacaagtaagcaagcagattatgttagcttcacctgcagacaatagccggatctctagatcattgggcggttggctaatggctgcaatctagaggagagctagctatacatgcaccgaccatgaggaactcgttgacgaccgagagccacgagtccgtgggcagcacgaacgccatgacggccgcgcccacctccacgcgcgacccacgcacacccgccagctgcacgaacacgcgtctgctgtccgccatcgccgcctctcgctcgtccgctcgcgctctgcggtgccgccccttgctgctttggactgcggcgttcttttgcgggccgacgaccggcgcgcaagatcgtacccatccccattttcagccaatgtcaaagcgtagcgcttcctattgggtgaaaagatgataccattgtgtgcaccacaccacgcagttgaacacgtcacatgggacaaccctaatagagcagcgtaaagctcaccccaatggctccgatgctgcgccctcgcttggcgtccgccgcagcgcgcgccgcctcgcgcgtgctcacgcgcactgcgccttcggctccatgggctgcagcctccttcgcggaccaggcactgggccccgtggcgggcgagccgcagcgccgcgtccagtacgactcgcacatgcccacgacgccgctgcagaagatcgtgctgtccgtcacgtcggcgctcaccgtgttcgcgaacccggaccgtggcgacatgctggccgcgctgggagaggtcacgggccgtgatgcgctgcgccgcatccacgcgcgcatgtgcgccgaccccatgggcgcgcgcatcttggccgagaagcccgtgatccgcaacgacaagatcgacatggagtacctgcgcgcgctgcccgccgactcgttcggccgccactacgccacgttcatggattcgcacggcttcgacgcggacggccgctcgctcgtgcgcttcgtggacgacccggagctggcctacgtcatgcagcgccaccgcgagtcgcacgacttctggcacacgctattcgacgtgcccccgacggtgctgggcgagatcgcgctcaagtacgtcgagatggcgcactctcagctgcccgttagcgcgctcagcgcctttgtggggccgctgcggctctcgagcgaggagcgttgtctgctcatgaaggtgtatgtgccgtgggccagccgcgcgtccaagaaggcccattcactgcactgcgtcatgtacgaggaggagttcgagacgcccattcaggagctgcgtcgacgtctgaacatcgaagtcgcccctccgctcccagactcgtcggagcactacaagcgccacaaggacgattcgcactgagctcagtgagagaacgacgtaataatggtgaggatatacttcgaattaggttactcatcttcctctgctgccgtgttaaggcttccctacaccgaaaaggtcgaagtcgtgatcgtggtgactgtcatcgtggtgtccctgctcggctgtagaggctttcagtgccgccaccagcgcctcagtctcgtcgtcttcggtggtttgagccttgatgccatttgcacgtccattccaacctgacgcggtagctggagctgggtgagcttgggcttgggtgtagtcgatagcagggtgcagcgttggtggtggtgcaacagtgccaagaacaggctcgcttactggagtggcaacagagccaagcgcgtgtgactgatccggcgtgacgttcacggaagctgtagttgtggtggctggcgtcgccggcgatggggcagtgatatccgagcgagtgtcaaccgataggcttggctgatgatctgacgacaacgatacatgaccaatggttccgtctcctcgaggtgctggcatcggcccgggggtgttcggcgacaggaacgggttgtgtgccacttcgcactggaaatcgtacgagtagttcgtgtccatgatcggctgtgtcggtggcttcttcttcgtcgcagccgcatccagagagctcaagtttttggaaactgcctgggctgacgacggtggcaacgggaacagttcctggtattcggcgcttgactcgctgtacgcgcttcgacctccttcacttgtcatgctattggccatgctcccaggagtatactgacgtcgcgccgcgagttgagcggaggatttgaatgcagcatacttgggaatggagtccatctccaaacactcgtactcgcccaagctcacgggactcagcggaccccccggagtgtctccatcggagagcggataatctggaaccactgtacctgtcgaagctgtaccccctggagcagcttcgggcaagctttgcacgctactgctgaccgaagcacccgcgctgctcgcagctgttgcgtacggatcaacaggtcgccgaaacgaagccgtgaatggattcagagcatcgttgtcgttgtcggcgcgaatggcgctctgtgggtttgacgtctgaccaatagtgccagacgacgccgatctgccgaagtccttgttgccgaacatctcggagaaggccccagtgatctccgtgccaagtgccgacatctccgtgctgaattctgctgccgtcgtagattgcgcccgaacaataggaggccggccatccgtagtaccagcgacgcccttaccattcgcgggcgcgttcttcagggtgactgtggccgacaaaatctgcaggtacgcgtccagctcgtcactgcaaccttcagcgccaatttcacccgtcacggcatactccgtcagcagcgtgttggccagcaccaccagctcgctgatctgcgccagacgcttctccatcttgctgttccagtctcccattccgaccacccagcgaccagcatccgccacatacgcgacgctcgatctgcatacgcagcgacacatcacaatacagcattagcatgcgcataatataatccaatgagtgttgtaggcaaacgcactcaagctcgtcgcggatctcgtctcggtactcgtagcaccgctggaacagcaggtccgccgtgtccatgaggcctgcacacacaatacaaagctgcacaacgtcaaaacaacagcctcagcttcctcggaaaggcacgagtgacgcacacgttggtaagttcgctcccatgcgctggaagaacttctcaaagtaaatcacctgccaacaacccaggaacatccgcagcaacacctcgcgttagagcgatttaccctacagtaaggttcgacagataccgctgctggtgccgccccaccttcttcatgaaggtggccaggtgctcctccacgcgcgcgatggccgtcatggacttgccgatgctggagatggactggcccgcgctgaagatcgacgtcatggtggctcagcggggctgtcaagggaggaggagacgcgcgtgcgtgcaggctgcagggctggatggaggcggaaggcggcggccgacggagcgtcgagggagacctcgcttccggatgctggcgttcttcgaagcgcaaatatactgagttttgtatcacatacaaacatcaagtgtgagggtcggccaggcaaatcacaagggcaagttgaagtgaaagcggctcggcttgaaaagcgaagagtgcagagtgcgatgtggtctttggccaatgggtctatggcggtggtgaagctgctggcagtgatcgtactgtaccaggcatgcagtcgtggcacgcatggcgcagaacctgccgggctacaataaaggagcgaggaggccgctacactgccaagacgtagcaggcctgcagtgcttgctgctgccggcctgatcagctctgtgagcggctcgcgaggacgtcgcatggccacgtcgagctccagcctatccgtatgggtggggatgcaggtggcaaatttcacaataactgctgctgcgcgtacatcaaaaagtcaagcagcatttgcgacgctggagctgcaacaccgatataatatccgcgctgttggaaacggatcattcgcgacgctcccctgcctcgcaggcgccggctgatcgtcgccggatggcattgctgctgggtggcaagtgtttgcatggaactgcagcgagcgcgctggtgtttgctcgtcaaggtagagatcagcggtcgccactgctgacggagacctgcatcctgttggtacagaggaaggagctcaaatgcgcctcggtcttcaacctgaagacagactcctcacctccagtgaagaccgacggagtgcatgtaagcggacggtaggacaacacggcttgctcaatgcaaggtgtatgtacctacacgtctcgcctgctcgtaactgcatcacgcctgtcaccgcgaatgcatttcctttcctctcggagcacgagctgcagctcgtgcaagggatccgaatgcaacgccctccaagcacgacgagctcgtttcgttgacgatagccgcactgtctggctgcagctcagtggggccgcaaagcggagattcttgcagcaacggccgagttgtgcatgactgccgcaatatgtacatgtaacgcctcgcagcagcacgactcgagctggaatggaagataccatggtacagtacttgcaaccgcaaggcgtttttgcagtgaggggcggagacccaacccgctgaacatgatggtcatgcggcgagacggaacgaaaagcaagtcttccaatcaagatggcggaaaatgtaagcaaaacgaccaactgttcgttttgcggaactttgtactttacttttttgtcatctaccgaacgaagaagcacgcccgcgattcgtaaaggtgaccagctccgcctgaccagcgccacgtcgaccgcatctggctgacctccttcactttacgctgcaggtggcggcgctgccagcgccatcctaaacttctcttgacttgaatttgcactggtttaaggccagcagcggatcctccgattctggtttgcgcgctgagctgggcgggcggcaccacaagcgcagtcagccaagtggagctggtttctggacggaggccgaccaaaacgcgtgggcgcggtggcgctggtggtagaagatcgcaaaaagtggcggcgccgctacagttgaagatcgctacaagcaaaaatcgatgaaaacctcgaagaagccggttggttatccggaaaaatgggcccgtcgcgaagaattatcgcatttaaacttgttatttttgcctcttcgagcggatgcccgacacgtcgtcgacgatactgcggtggactcttgccaccggctgcgatccgggagacctgcgtgcgttgcaagcgggagccaagggggctttgcctgcattcccacctgcgggggctcaacagtgagaaaactcgcggcatacaaaacccaagtggtcggcgcccagttcggtatccggaattcccggtccagatgactcaattgggtcataaaacaaccataatcaactattggtcccactgtaggcaacagagagtcggagctttcagcagtttcggtacagtaatctgcccgagtaaggaacgcctgatatatataaagacgcagaatatatcaattgatgttaagctgagtatacttttccaatgtactgatttagttatttcaaaatgaactgaagagcagctttacctacgagtccggaatgattccaacagtggcgtatggtcgaagaactaacctttgaccaggcatcctcgcaccacaacagcgctgtcaaatgggtggagtgggggaggaggtgggcttgtggggcgaggtgcaaaagcaaaagtgcgagtctaccactacggtacatgtagtttgaagtctagtaagatcgctaaatgcgcgccatttttcaaacgagggtggagagctgatgattggcactggatttttcaccttagtagctcagtaccttgcacatccccctatcgccacatcgactggaaaataatattaaatatgtgaggctattagttgtacacccgttccttattcgggcagaattctgtatcaattccatcagcctgcccccctgctcttttacctttgccaccatactttgcttgcgccgttgcggccacgccccgatcggttcggtctcactctggaattcgccccgggcaaacgacgacagcgtttttcgtgtgctaatttcccagcgggcaggcgatgggggtgccgaccagccacaaggagggcgcattctacagcgccaattccgtttacaacaactcggtgcaggacggcggcatggaccacggccactccaccatgaccatgacgtacgggcccgacggccgcagcagcttcgacagctacgagccgtcggccatgctgggcaacaaccgcttcgtggccggcaacaagttcttcaactaccagcagttcggcgcgctgcgcgagggcggcggcgtgagcctcttctcggcctcgtactgcggcctgctgttcgccacggcgcagagcagcctcatctacgccgcgctgaggtactgcatgcgccccacgctcatgcactcgctgctgctgcagcggtccgagagctccgtcgtgatcgagtgtctgctgagcatcccgacgacgctcgccttcttcctggggctgctctccgatgtggcgcccatcggcgggtaccgccgcaagtcctacatgatcacgggcacgctcacgagcttcctcatgtgcatggggctcatgatcctctcggccaccgtggacgtcgaccactcgaccgaggaccagcgcagcgactacatcgtgtactacatggtgctcatcatgggcgccacgttcggcaccatgctcagcaagatcgccacggacgcgcgcgtcatcgagctgtcccagcgcgagccgctcacgacgcgcggcaagctgcagatcaactacctgctcttccggacaggcatcgagtggatcgggctctggctcacagccctgctcatccgcttcgacgacgacaagcgcaactacgcgctgcgcgtggacccgttctgggcctacgccgtgctagcgctgctgagcctcatgccggtgccgtttgtgctgcgcaactgcaacgagcgcaccgtggagcagtcagaggccggcttgatgaacgagatcgtggcggaggagggcagcgtcgccatgatcaccgcgggaccttcgactaccagcgcgcgcatcggcgccttcttccgcatgtgccagcagcgcgccgtgtggcagctcgtgctcttcctgtgtatcctgctggccaccacccgcttctacatcggatcggccaacgccgtcttcgtcaggcttgcgggactcaacgccaacacgacactcttgaccaacgcactcaagtacctgaccaccttggcctccatgatgctgtggaaggtcttctggtccaactcgtcttggcgccgttgcgtgtgcctcggtatcgctgtcatggtcatccccgagaccgtccgcgcgatcgtcatgctctacgtgccgtccatgcgtaaccaggccttctacgacacgatcggctgcaccaccggcttcacggacggtatcatcactattttctcgctgatccccgcgaccgagatcgccgagaacggctccgaaggcgccacgcagggcatgctgctgtcgttccgcagcacgatcgccatcgctatgcgtaccttcagctccgactggatgtcggacctggcccccgtgagcctcaatgacggcacccgccgccttctgttgctgctcatcatcacgtacatcgtccacggcatggcgttcttctcggtgctgttgctgcctcgccagaagctcgacgcccagcagatgcgcgtctacggcggatacagcaagttcgcctccatcgcgatctggattatcttcgtcgtcttcttcgtctacgccatggtcgtgaacctcaaggccatggccgacatggcgagagagtaaggtattaggtagtagtagttgtaagttattggttatgaacatcaggagctagtgtcgcttcatgaatgtaatgcagcgtcgaggtcttgtgctccaaacctttgctggtatctgtgaaactggtgatgtgatgtcacccgtcggcagaggatcacgcgaatgctgtgttatccaactctttttcatactcgaccccttcgatgtaggggtcctcgttgatgacgataatctccgtctgcctgtagcccatggacgagtagaacgctcgcgccttgtccattacggcgccggtgcccagccagatcttcttgtagccgtgcttcaccgcccaatcctcaagctctgcgatcaacaaacgaccaacgccgtgacgccgatagctccccttcacagacatgcggcgcaactcgcccacgttgtcgcccttggcctcaagagcaaccatccccacgacttcactcggatccgatcgaggtgtagccacccaaaagttgcccccaggcgcgacgtaagtcgcttcgatgctactcaaatcgcctgtcgccactgcctcagtcatatgctgctccagtacgtcgacgctcatgttgtgtgcgggataatgcagcatgccctctctgaagagcgtcacgacctgcttcaagtcctctgcttgatactggcgtatcacgatgtctccattacccgtcacctccccaagaagcttctcaaacgtgtagatatggaaatcttcgctgacctcggcgaccgcggtctgttcgtaccccacggacgggtagaaggctcgagccttgtccattactccaaccgttgtcaaccagaccttccggagtccgctctcccgagcccattgctcgagcgcagcgatgagcttctgtccgacaccgagacgccggtgcgtgcctttcactgacaatcggcgtagctctccttccttgttgtccttgagctcaaggccaaccatgcccaccacttcattaggcgccgtcttgggcgttgcgacccagaagttgccaccaggagcgatgtacgtgccctcgatatcggccaggtcgctgctcaaactctcttggagatacgcctccgtttactcgggcatcgcttggaaagccgcgtacgagtgcatcccggcctggaacacttccagcacttggggcaggtcttcagctcggaatggacgcacaacaacgtcgtcggagatgccaatggcagataccatatcgggaaagtcgagtgcgtggaagagaacggattctaaagtggcggacaggaagacgacgatcatcgatcccataagttaggtacacgtaccaaactccaccagcacaaggcacaatgctttcgtaatcctgcacatgtttcagtcagacgaagtgtccgatataacaagaccgtgttcaactaaccgtcattcctccgatagacgctcgcaattgccgtaatacacagatgaggagaacttttggcgtaagatgcactgctcagagtctattcatttatcggtactggggtgttgctacagttcaacgcgatgagggcctcacaaagccgcgttcttgtcaactgcgggagccaacaccttctcgatcctcaccacctcgtacggagggtcaacgctcatgaagtactggtcggtctcgacgttgcccttggagtcgtagaagttccgcgccttgtccatcacagcgccagtggtgagccagatcttctggagctggtgctccactgcccactgctccagcaccgagatcagcaggtggccatgccgtagcatcggtgcgtactcttcaccgacatgcgacgcagctcagcctcgaggttgggcttcagctcgagccccaccatgccgaccacgagcgatggctcgtcgcgaggcgtggcgatccagaagttgccacctggggtgacgtacgtgcccgcgatgtcgcttaggtccgtcttgagactttcgtcgataaactggtgcaggcggccgttgttccgctggccaggatagtagagcatgccctctttgaagagctgaatcacttggtccagatcttcgttgtggaactgacgaaggacgattttagtcgagtcacgagctggtgctgcggtcgggggagacgcggcggtggagtaggcggtcggagccatgcttcaatttcaagcagcgagccttgcgcagtcggaaggtaaaatcgaaatgacgctgttgaatggacttcatgccgccggtgtagcagcagcacagatggcttcgctaggtatttgtcgggctggtgctgcactgtagcgtttggcaaagcactccgaagccgctgcatcaaacgcttcaatgagatgaggattggatgactgtgattagatgaggtactacttagtaatcacaagatgagactgtaaagcccaatgattagattaggccaaccaaatcgccgccggttggttatcctccggacgatgttattctggcccagaatggacaaattttcttggaaactgaattatttaatgaaggtcaaagacctgctattagtgttggtttatctgtaagtcgtgttggttcttctgctcaaattaaagcaatgaaacaaattgctggtactatgaaattagaattagctcaatttagagaagtacaagcttttgctcaatttggttcagatttagatgaacaaaaagatgatttagaaaagttaacagcttatgaatgtggatttaatccttatgatgatgctagaaaaagttttgatgtaaaattttatctagtagctattctttttattatttgtgatttagaagctgtttttgtttttccttgggttttaactttaagttcaaatttttcatggggattgaacggatttgttaaatttaatttaagatttacaccatctatcgaggccaaggtcttgatcaaaacgctgctcttgacgcagccgtcactggatatgaggtagatttccaattcagcaccgacaagtctcaaggaaggtaagccctaatatattaatgtacttctgctgcagtaggctatagctccatgcacgataacaccgactcacgcgaagctcgcgggtcccaattttgatgacctcgaagggcggctcctcccgaacgatgatgacttcggtctccgtgtagcccgtggacgtgtagaaggccctcgccttatccatgacgccgcccgtcgtaagccagattctgccgagttggtgctctgccgcccactgttccagcgtcgagatgagcagacgaccgatgccgtagcgtcggtgagagctcttgaccgacatgcggcgtagctccccttccgcgttgggcttccgttccagacccaccatgcccaccacgagcgatggttcgtcgcgaggcgtggcgacccagaagttgccgccgggcgtgatgtacgtgcccgcgatgtcgctcaggtccgtcttgaggctgttgtcgatgtactcgtggaggcgcgggtcttgctggctcttggggtagttgagcatgccgtccttgaagagctggatcacttgcggcaggtcatcgctgctgaacggcggacgacgattttgccgagtcgagggctggcgttggcgctggcggtgatgccaatgtgacggaggccgtcggggccatggcgttctgtggcctgcgcaggcgatcgtcaaatgaagagtgactgggggaaagcgggaacgtgcatttatgtttctagccgagcgccgtacgcggcggtgaattttttgttagttggcgcttcgctcgcaatgctcgctgcgctattggagcagactgcctatgcttcgctacggcagtggcggacccgttccgctcgcctcgtcggctcgctgcactactctcaatgttagattagtactacagaggccggggcgggtcctgcggccccgcaatatcgtatgagggggtcgccttcgctgcgcttggcagctaatcggaattagtaggaatcgtacttagtgaataagcgtgacgatttacggacagcgcgtctttctgattgattcttaggaaaagcgaccgtgctggtgctgtagcttgcggccaatggttgctgcacatcctctggccgccccgtgtccttgcaacaccgggaccgccgaggatctcggcggctgactgagctcacagctgcttggccagctcgaagacttccacacgcggctcgagcgacacgaccatcgtgccgacgtcctggtagccgatggcccggtagaaggcgcgtgcgtcgtccttggggccgccgttcctgaggatgaccttggtgaagccgttggtcctggcccagccctccagctccgccacgaggcggcggccgagaccgtggcgcctgaaggcgctcgagacggccatgcgtcgcagttctcccacaccatcaccctgggcctccagccccacgatgcccacgaccttctctccgccgtcggctcccgtcgccgttacgacccaaaagttgccgccgggggtgatgtacgtgctcgggatgcgggccaggtcgccgtcgagactctcccggatgaactccttccagtggtcctgcacgtgcgccgggaagctgtcccggtagaactcgcagccgtccacgaagacggcgttcacaccttcctggtcctgcggcgcatactggcggatgcagagcttgggctgctccttgggctgctcgacggacgccatgtcagtgtcagttgcttgatgggctgacgtcaaaagtgctgctcaatttagaagcatgattacttaacttaagaatttgaaacacaaagcgttctaaattaaggatcgggcgaagtgcgcttcctcgtgcgtcatgcccggcgtgaagatggtcgtgtgcgtgagcgtgcagccctgcgacttgtagaactccacggcgttggtcattgccaggcccgtcgacagctccacgcgcttgaagccgcgagctctggcccagtcttgcaggtgctgcagcagtctccgccctagttccatgcggcggaatccgtccttgacggacatgcggcgcagctcgcccacgtcgtcgctgtggcgctgcagccccaccatcccgacgacatcttcctctccgccctcggtgcgcgcaaccgccacccagaaccgcccgccattggcaaagtaaaccccctcgatgtcggccaggtcgctctccacggacgcctgccggacccgcgcccacagcgtcttgctggcctcgtcctcgccctcgtaagagtaggagatcatcccgtcgaggtatatttgcaccaccgcgtcgtggtcggccgcgcagtaaggacggatagctacatcagccacagactgcgagacggacgccatgttattgtttcggggatatgaatgatttgataccgagtgagaccatgggaggcggtatcgattcttgtgacgagagccgcaaatgcagtcatggtttgactccgtcttcgctttcagaatcaggatcgcatcgggctgtaaccttgggaagggggggggtctgacctcgacaacttcaacgtcatccctgtatcaatcggagctattcatggagctacccgctagctttagcgctccgtcttcctccgaggcacagcaaattttagattgttagcactcacttccaattcctctacggatatgcttgcccctcagagataagacatcgaggcagatggcggttcccttcgtcaagatatgctcgccggcgtcatttccatctagttgaagacgcaggaagccccccgggagcagcagcagcggatcatggtgacaagtgtcacggggccgtcgtccacactggtatcggagctcaggatgctgcagacgagcaacggtggcagcaccatgcctatcgcaagggtcatccagtcagctaagccgacccgacgagctcaccctcagtccgttcaccacgtgcggcaaatggcaaagctttcgacggccgccaagtccggcgaactctcgccgtctacgagtcagactgcactaacgatgagcacgcgccccggatcactagcggctgtcaacgtattgacacccccaagtgtgcggcctcatacggcaggcgccttcaaggcccgaaaggtggagcccacgcgcttccgctacttctgtacgtactaccggatcaaagcaaacaccttaagacgcaagtgtgaccgctaattcgttgctgcgtgcagatgaccgaggagatctccctgtgcgcgtgaacttcgccggagctgtacggaagctgcagtggcaggtcgatctgtcgctcttggatttcgcgcactacctgccagtgttcatggaaggactgcgcgagctggaggagccgtatcacttcttggcgcttaacggtactctggacatgctggagaagggcgggagtcgagtgctgccgtgcctaccgcagttgattccgcccatcaaggcgaaccttatgacacgcaaccaaaccgtgctgtgtctgcagatgaaggtgttgcagcgactcgtgctctgctgtccgtacacgggcgaggcgcttgtgccgtactatcggcagttgctgtcgatcttcaacatcttcatcaccaagcgagtaaactgcggcgactccatcgactacggtcagcgacggcaggagaacgtgggcgacctcatcctcgaaacgctcaacatcctcgagaagcacggaggccccgatgccttcgtcaacatgaagtacatgatcccaacctacgagagctgcatgacggggcggagatagataagaccacgcttcagtcttggagtcaggtgatcgcgctttaccctcgtcagtttaaagcttgtacagtactttatttttgaggaccagaacaacgcaacatacttagacttcgggtgcccatccatccagtctcctttacgcttgggctcgctgagtcgctgagtcgagtcggccattgtacacatcacttcagacttggacaactcgcactcctttctcccgaggctatgaagtcaaggccagctctgacggtggtggcgtctgaccgcgagcttgactgcaagcaccgaggcgacgatgacgacgacaagttcgaagtctcgtgcgatattggagagacgacgctacacaaggccggccttcggatcaacagctcgggcgtcacgttcgcggaagacaagcccggccacaaacacgacgaagacgaggtcggtgagtgcgtggtgatctctcactcgacgcgaaagctcgtggcgctggaccaactggagacgtgcagcatgatcgggaggggcagctccgggcaagttttcaaggcgcgacactgtgacacgagtgcgttgtatgcagtcaaagtggtgaccaacgtgttcgacaagcccaggcgcgaccagcttctcaccgagatccgcacgctctacggcatcgagagtgagcaccttgtggggttctacggcgcatacttccaggaccacgcgttgagcatcgtgctcgagttctgcgccttggggtctctggaccaactcctcgcaaaactgcctaagcacgctgacgtcgtaccagaacgcgtcgttgccgccatcgcaatgcaggtgctcacgggactcgcgcacctcaagcgagtgcgccacgtccaccgcgacatcaagccgcagaacattctcgtccagcaggatgggtcggtcaagctgacggatttcggactcgcccgcgagctgtgttcctcgaccagcatggctcagaccttcgtgggtaccttcaagtacatggcccccgagcgcgtgcaaaatgagccttacgagtgagttgtcgaggggtattgttttgtttggcgctgatcactgtgtgagctcacaattgctgcgttggtattgtcagctacaagtcggacgtctggagcgtcggccttgtactcatcgaatgcgcgacgcaaactttcccttacgcaaacgcgcgaagctacatcgacgtaggaaggaattcgtggtcttggtataagtaccgcctcattgggagcttacctaacttggacgaaatggttgtgactgcattgataggtggtccaaagcatcgtcgaaagcccggagcctcgccttcctgaagtggatggtaatggggagccgtttactcccgagttccacgaatttattggccggtgtctgaagaaggaggtgagatagttttacaacctttccattgtaccagcatcaagtcaataactcgagtctgcggtggctgtattcagccctcagagcgtgcgtcagtcgaggagctcctcgcttcgccttggctgcaactacacaacgccacatccaccgaaagatgcatgcagcggtgcgctacgtggctccagaaactccatctcgttactgaggacgcatcggaagcgaaggaatctcacgggcagcgtcaggacgcgaaggagctgaaggcgaagcagctcgatgaagacgacgagatcgaggaagatattgaggtgcatgaagatagcgattaattcgcgagcacgaacgcgttcgtggaagcagaaccacagaaccataatggcatttcaagctcttcattcttgccttattgagctgttgcaaattagtgagagagcaagtattcgcgtgctgagtcgtgagcagcacaagagccataccgcctcgagcctgctctctggggatcactcgagtccaaaaagagcctctcgcgcagagccaccaatacgccgaccaaagtgacagcaccaatcagaccgacgacgcccaggaagcgagtggcttgttgctcgcccgccgtccagctcttcatgtggatcgcagactcgacgtcaggctcctcgtccagcaacatcgtagccatttgctcggcggcagcaaaatcgtttgacgctctaatgcgcgccaagcaatcggggaggttcttcagcatcgtagagaagcggagcgttccaagacccgaagctgcgtcccatccagtagtggccatgtgccctttgctgcagcactgcatccctctcgaaccgcacgagatgtcgccgtgggtgatgtcggcgaacacttgagggcacacatcatacagccgatagagcagtgggttcaggaacccgagtggcggcaggttgggcagcgcccgattgagcagcgcgatcatcgaggccaccacaggggcagacacagatgtgccatccgtcgcacccaccgcgccgttgacaaccacagggaaggcgtgccccaccgctgcgatatccggaagtgctcttccggtgtctctgaaatatggtgagagcccagacgagttagcgaagtccatgtaaggacccacagctttgcgttggtactcgggcatgtcgtagaggtcgctaaatccaccgccagatgtgatgagcgcccgagcttgagcagtggaagtcacggcctccttccacttcccgttggcctctcgagcagagcccgtggcgatggtcgtagctcctaccgctgtcacgtacggcgacgacgctgggaacatggccataaacttggagcatgttggcacgcgacagaagccgtcagccaggtggctgcctcgaacgccggcgtcacctgcagagaccaggatcgaaatgccacggagagctgccttcatgagctcgcggttcaccgcttcggcgtacgcgaccggtacgctgcactcgtcgtccgtgtagctgatggacacgacggcgggtgggggctgcatcgcgttcacgtcctgcataaaggtgaagaacggctcctggttgtctggagcgtagcctcttgcctggtctcggagctgcgtgtaacacagcatctcgatggttgaggcatctccagtctcatgcgccgtcagacctgccgtcacctggatatccaaggacgcctcaccagtggggccttgagtcgtgcacggccccgtcgtcgtcggcatcttgaaagtttggtgctgtccgtcgatcgtgcgcaggaattggttcagatccatctcgttgtagaattcgtgcaggaacgtgcccaccacgagcttgtagcgatccacctggtccgtccgcgcgctctcttcagccacgccataggtgctcgagttgactgtgagcttctccggaatgtcgtactgctcacggatcacagccggcgtcgccccgctcgtcccaacgaagaagtcgttcgcgaagggttgctccctgacagcgaacgggtccttctcgtccgtgcctcctccctgcatgaacttggcctgcatttccgtcgggaaactctcgagtccgtccacgtaggtcacgaccccctccagctcctgagggatgctgtagctctcttcaggacggaccaccgacagcccggagcgttggcggtgcgtgtagtggaacattttggtgccgaaaagtcgctccgccgcagccaccgcgagctccaggtgccacaaatcttgcaccgcgcccgccggctcggcccgcagcacttgggcgtcctgcacgacctgctggaagctccggagactggcgtccggcggcgcgaagtgcttccggagctgctccgagctggccaggtgctgtccgtacagcggcgacgcagggtccgtcacggccgccactagctgtcccaattgctcgtcgctcttgcggggcgtgagggccacgcgcagagttatcagcagctcgggggccgcgcggggcccgcgctcccagcgcgcccagtgcgcgttgtccactgtccgcgcctctgcagagcagaccgcggcaagttggagcgcagccagcagcagcacgcacagcggggacacaagcagcaggatacggggcttcatggcgacggaacggggactcagaccaaggcgacgcgagcgaaggtggcgccttctcgaccgcagaggcttgccttgaaggggctcggcttcggatatgttgaactgagatggtcgtcaagttgcaacggcagccacgcaacttgcaacgatctctgctgaaaacgaggacccataaggtcgtaatttcatcaatatttggtcagttctgataaaaataggaccagtcgcttcagggccgctcctacatgtaaccatgccatgccatgccatgccaccgaaaatcggcatggttaggaaagcaatccaagtgccatcatgccacccgattttttcttatcgtatagttttataaccatacaaaaatcaacataaacctgtccaaacgatggcgtggccgatagcttttgctatccgtggcactttcattactttaaactctaaccctagcaaatcattggccaatcaggtggtcttatttcctgccatggcatggcatggttcattgagcctttttaaagcttatattccataaacatatttcattattaattttgttttctgatattttctttgcatattcgcagttcgaagaactgtcgattgggaaaggtttttggatgacatcgaacgacattcgcgctacagtcgtagcttccccgtagcggatgacatcgaacgacattcaagccacatgaaaccttggatctgcaagaatgcagcccgtgcaaccttgttcgtcgtagtagcatgcattgtatagctagctactgacaactatattctacaacgttgagttcaatgttgggcatacgtcctgatgatgctgatcgtgagcccaaccacagcttccaataaactatacgggcattatcacagcactacgtcgtacttgtaaaatattacatattaaataaaatgttcagagcacttaaaattgtacttcgaagtagtactttactgaccccattggctttgatactattgacccggtcgtattgtatgacctccgctttcagacacactagaagatgatattgcaaacgtattccacatgcatagttctatgagccggtcgaccacgagactgaaaccgattaattggtcatgtaaatttatcctggaagagggaattcctgcacattcattggaacaagtctttgtggattaggcacgacttccacgaataatattaaagttgtgcgagccaaggtagcttgcttgctactgtttctattcttatttgccgaaccccttttaggcaaaagcaaaactatcttgagattgacaggataccatgttgtcactgaatacggtgtatccgtatttatgatgattccttctgaaaacgccttataccccatacacagcggcaagtagagctttggcatatgcatgtatcaagtgaaaactaattacaccgatttattgctgctagccgatacgctggcaaaagttacgacctcttagtcaactgcgcttcgtttagatcctcgagccgcttttgtttttttaaggcatgttttgtttttgaatgattaatttttgaatgattgatctcgacaagagcccatcgagtttggtttcattttgtagcattttatcggtccgaactaccccatcaaaaaaaaatctttctttgagcttgcaacagacgaaccgaaagcactttaccaagtatgtactccccgacttgtgaggttgaagcagatgcagcgtgctcaagctgtaaaatgtgcgctataaattcgtcgatttattgatgctcgtcacgatggcagctagtctgagcgacatgcatccacaatagcggtctagtacaggtacaaaactaaagaagacttccaatatctactgcctacacatcagcttacccggcagttgctgcggctgcgaagcgggtgcaggagatgcctgtgaatagcacaaggtttttgataatgttaacgggaaattgcgcgcgcggagtctgctgcttgttttacttttaagtacttacttggctacgagatatccgacgatgtaagcaagcgtcgcaattttaatttctttttatctacaggttgatttggttttattttttgtgtgaatacaggctgtctactgggcgaacctcatctaaaactatttcggcgtacattacccttcattagctataatgcttcatttagcttcgaactgcgaaccccccccgggttcaccacccgggtcaccaattaacaaacgatatgattttcgttgaccttaagccacgcgattctcgaagtaagtctaagaactacgaaacgcgtgaaggcgaatatttagcagctttgaagctcacaagtaagtttgttatcttacgatgcgaggtagatattgcgctgactgcaacaatgcctacaacgatcacagtagctgcttgaaaattgttcctcgcccccgtagtagtgaacttttgtgcgcgttttcacgtggttatctgtgtatcgacactcaaaaatgtaccgtatccaccacagaagtggacggtccactatttgagccacctacaggcttcctcgtgcgttcgcatcggtcggaaatgaatggctcccccttcatgggcgacatgtcggccttagtgacggaacaccagctgcttctgcttctccgctagtctgggggtcttggttagctttcatcaggcctctaaccccttctccgagcagcagccgtggtccggagccacggcagttccggccagtacgcctgttgtctgcgttcttcgtatgctgctgcgccttgcgccgacccccttgatctcctttccttggccaagagtcttccgcgtcgttcccccctcgaatgcccgcgcctcgccgtcgaggcgtctcacggcgcgatgccgtagtcatcaggccgctgggagtcgtcggctgagcactgagctccctcggtttgtccgcgtccgtagccgagctgtgccctgccaggttctcagcccggagaccattggcctctacgtccttggccgcttaagaacagggggcgcccgcgtcttctgctttagggggtcaccccaacccgaccaggattcctcgccccggtgtgatcgaaatggtcatgggttttgagacaattatttcgacgtatgtatcttctccaatatagtattacattctttattgcaggcataattggtatagagggcttcaacttagtaatgaccgccaaaagatatcaggtttaccggggattatttgactgtacagatcctccttaaactcgtggcatcctgcacttctggcctacgtatcgattgggtacaggtagtactgccacttccgacaccagctggtgtgtatttttcatgcacacataaatagttagcaggtattacaatagagaactttagagttctctaatgtatgagcgcaccagcaccaagttggcgtggcgaccaacgtcgccgctccgttcgttgatcaccggctcatcggtgtgagccccagcggccatagcaccccaataaaatgatagcgcaagcgataaattaactatgagacgaagttgtgagtgagctgttgtggttgagctcatccacactcgctgaatgctatctgcgctgcagcactagtaggaagctatagacgctggtctactatctacgccagcgctttctcacggctccatctaccagttcttcctctgtcgtttctactcctatgttctcacttcaccccactacttgccgctaggccgaggggcccacgggccgggctaactgctcctctgtctactacctcaagtccttctgtccgttcttgcggcgaagacgatgcctacctgccagcacccccatccccctatacctccgcacccaagagacacgtttccgcgtcccttgagctgcactcagaatcttcgtaagcctcgcaagcttcgcgcgcgacagcggtggcttgcggcggcttgcggttgattgagagccgctcaatgcttggcgtcgatttattgtgaaccctgctaaagatgatatcaaattgtaaaggatactagatttgacaggtgtcggaagtgagagtacatcctgtagttggagttggagtaatagtgttaacacagcgcgtagaaacccgagaacttgtcacggagcttagcctcgttagggtcagccaggatgttctcgccatggatgacctgttggtcgcactgccgtctccggctaatgcggcgcttgcgcgttctagtccgtgtcgagtttgtgggcgcgcacgagtgcatggcgatgctactggccgtcggccgtggcagtgctgccgttgctacgggtcatagacagagtgatagggccacaccgcattgcccgcggcgactctagcgtccgtgcccgtcaccagcgcttcctccaatcgccaactctctaaatttagacaatcagcaagtgacgagtcattattaaccaatgatgccgtagtgcaagcatttttatccaatcagaaagttatcagctcgtttttttctgaccatgcggccatttttagggggaaatgaggagatacatgtacttccgcctcgatttctcgtcaaccatcggctcaaatgtcgataccggagtacgaggcgatgcgcaagacgcctacctagaccgttgtgtcagtcttacattctaaattacttttgcgcgtttcacagtatgagctcaagctgcaaaaagcgttgaccttaagtcgcgtatcgcctgttaataccataatattgaatatgctatgtattgtgccaatcactgcgacttcccgcttgacttggcctcagtatactactcaaacacaagtgatttagcctattgatcaatcaggtgacggcaaagtctaagaatgtggccaatcagagctgctgatgctcctagtacagtgccttcagcgtctttccacttgacttggcctcataacactacttcatttaaggttactatgacctcacttggccttagtatactacttaaactttggtaaatacattgttggtgattatcttgaacgtaattagtgtcagaattaaatttgccaacttctaccaaccactgcagccgaaactaactcgcctcgatgtcgccgaactctaaacccctaagcaacaagctcgtgtgcagcctgatgttcaccaagaagtccaggaagagtttctgtgcttaacctgttcgaagacgtgcaagagtgctcatggctacaccaacctgatcacgcatctccgcaccaaccacccgacctaccttgaagatgtctttcaagccgcgaaggaccgcaacgcactccgcctacgtgctgccgatgacgagacgcgtaccatttttcgctggtccgagtgggtcgtgctggagatttaagccaccggaacccgtacgacatgactggggccgtctatggcgtaggatgctggtagctatccgacccccggggggggaccgggttccgtacccctcattacactatggggcttttttatgcacgggccaccagctcacccaactatccaccaccacattgggtgcgggttggcagagcggaccgtcctatagtgggttacggctgctcgtccgcttatgcaaatctccggcttcaggtgaacgtcgtggttcgtgctagaccgtctgcctctgagtttcgtcgagcgcaagatgacgaggaaaaacgcttcgctgtcctcgattagccaaaagacgttgaagatgtacttggtgcgggtgtaccagtctgcagaggctagggttactgaggagcttccgccgacgttcggcatcgtgctcgatggctccaccttcagcggccgtcactacatcgccattttcgccgtgttcaacgacccggggatgtgccatggaactgaggttaggggtggcactgactactacgacgacaccgactgctacacgcgccggttcgtgctgctggcatgttgtccgctagacgtggaggaggatctcggtgcacagagcctgtttgacctcatcgctgacacgctcacacgctacaacatgccttgggaggcggtccactttattgtgaccgacaactgcaacgtcaaccagtacattgggagtcgtaaaggtgcgcttccaatggtcggctgtgcatcgcacatgtttaacctggccgtgtctgactatctgcccgactacgagactctcctggcgaagatccatgcgttgatgaacaagatgcgcacgatcaagggtcgcgcaattcttcgccttgtaagggatctgtcacctctcctgcgtaacgacacccggtggtcgagtatccatgccatggtccagcgctatactaaaattgagccggctctcaattctctgggctatggcaccctcatcgagtttggcatccagccgctattgcttcacagggtgtatccgaaaagacacacatgcttctaaaggtgctcatcgactttgagggggtgaccaagacgttacagcggtcaacgttgacgctttccggtgttcgacgtccgttcgtgtgacgaagcgcccgtgcctttttgaaaaggttcaggttgctacaccgctcgaccttggtcttcgctcagcccttgcactactcggctcagccctgcttagcgctgcaagagttccgctcatctcctcccactgagcgaacactcccactccacttcgctaggcttagctgcttgaacgcttggctcagctccgatgtatcagggttacgcgagagttacccgaagggttacgaagattgggacacacaggcgttgtgggtacgcactttaacctatttcagtaggaggatcagtacatggattcagagcaactggttatgcatatgactagggttcactatgctagatagtgaaccggatacatttacaccgtaggcggcttggccgcgctaaagggaaatacattcagtttgagattcacacaactaagagttaagggttgactcttggagtccgtaaggtgtacggactcgtgcgttctggtattagaacgggctaccttgagctgagactctgtgagtccgttacgtcttcctctgacgctaaagctacggcagccccgctgcatccgactttatgtctctgagcctgggtgaggctcgtaccagcttctactatcttctcttcgagtcaagcaacgacccggtctggagttagtgactcagtttgagcctagtccgaatccaaggcactcacacacaccctgggactgcccgcgcaccaggtccacaatgaaccgatactaataatcacacaatgcaccggggcacgccaatgtccccaagcacacaatacaattaacctgcctaaaccttcgaatggatcaccttccacccgaaaatatgaaataaacctgaagatgtaacagttatatgaaataaccgtactgccgtcgcaccgaagcactctgacaacgttgatatgttagcttgaatttgtgtggatgatcgtcaagacaccttctggccaaagacctccaccacttgcgtccttcggggcaaaacgaactatgtttaaatgtttacacatgcacaaactaggactcactaagtgggggcgcaatatccccctgggtccacactgactggcggcacgaagagcgtcggctgtatgcttaccatagcgcgcttgagatctgcttgaggtccgcttatatctttgtcttgaccaatgccgaggctccatgttggcacgtggagcgttggtaccgttgaagctgctggaagtgtccgcgatcttgagcagtcgcacccattgtaggcaggcttcaagctgatttcaccggatgagtgtactcgccggtgccaccaactttgccgtcattaccactgtctggacttaagttcagcgactcttcacccggcacttcaactggacttcgacaactccactcagggccataccactccgctcaggtatgcaacactccacttggcttctcgacttgggctttaaatgttaaccttgcctaagtccttgtcccatcgttctctcacgctcctgtggtccaaccgcacgctcgctggctccctcggcctttgtggtggcgccaccgactctttgctggacgttgacgtaatccggatacaagatcatcattcctttcccaggatcgacgtcacccctccccaagcagatatcccctggtctagatcatcttcgacggggtcactcctctggaggtcggtgtcactttcgggggagatcacacttgatcttggtggatggcttccgacttcggaaaattctctgttcgctccaccacagtcgtcccctgcacgagtggaggacgcacaacggcaatcgctcgctgcacccgtcgtcagcgccttgctccgttccgcaccccgcgttcgtgtcgcactcatgtctgctccagctgacggtcccgccgccggcagtgcttctccagatcaagacccgtcgacgcctctcggcgcggatcgcgcctcacagaatccaggatcaaccttgccaccgtcgcctccaggatcgccgctgccgtctcgtcctcgctccatggcccacccggggacatccagctcccaagcgcctccggtaacctccaactcgccattggccggcttggccctcctagcagcagtggctggtccccacgtgggagatgcagctgacgtcgaagaccccgacgcggaagatcctgctggccgtccgcccccatgtcaagtgtgcgcgcagatcgccactgctccgaccgtccgcttggatcggcctcgtctcgaccagacactgatccacaactctctccaaatgatccaggcctcgctccgtcaagtagaggaggcgttcgcacaaagtggtaccgacgaccagttgcaggacgaggacgtggagctgcagcgtgaccacactgctgccctccggcactcaagcgatttacaccatcagatcgacacctcgacatctgccgctcgatctctcattcaacattgccagacacgtcacgactggctgcttgaccagctccagttgaccaactcgctgctggtgtcgcgtaatctcgacgtggaggctttggaagagagagtagcggccgcggaccaggttcaagaggagatggatcgactgcggacgacttccgacgccactgctcggcagattcgccatcaagttgccactctagaggcccagatcgccgctgtgacgaaccatcccgacgttggccccgttccgcctcctgcgctggcacgccgtctccaaacccaggatcatgagccactgcgactgcgccgggccttcgaggccgcgcaacagcgctgcgacgcactggagcagtcggagggcgccttggaagaagcatttacccaactgcgcggccagatcgactgtcaaggttgccggattacgcgcctccgtgaggatctgcaaaagaaccttcaagatacacaacgtcggtgtacccgagccgaggagctgcgtccgatggagacagagcgtcatctcaagcgaaggtccgagctccacgatctgcgtaagttccttcgcacatgctgaccttaattcttcttgactaacaacgtgtcgatcttggatgtagatacccatgtggattccatgcgatccatcacggcccagttggagcagcaagtcgcacattggcggaataccagccagatcgccgctcaacttcttcacgaccatcagcgtgagatcgaagagcttcgtcaggcacaagcggtggccactcagagcgatcagatcctccactacagggacggttacacgcgattctcgaacatagcggaggccatgggccaagatgcggtgcttcccgcgccttccacgtttgccgcccctgttcccactggatcgacatctccttcggccacttctagtggatctcgcgccgcgcctccaacggcgagtacttcctcaacttccggacgagctcggaaggcacaacgcacgtcgtcgcccccacgtcggggtgcgccttcacgctcccgatcgccgccgcgcaagcgtcccgccagttccagatcgacccgtcgagctgatataggcgggtggtccaaggcaggcgggagcagccaggccccttctgacatctccgaggccgagatcgacgactccacgcaaggtgggtctcagccccactcttcgtccaccccagcaccggagatggatacaggcgacgacgagatgggcgccgacgacgaaggcttcgaagaagagtcccgtgcagccctctcgcgttcacggtcggaacgtcgacggtcttctggaactggggttggatcctcgaaccggcccatcgatctgagcacgggtggaacgggaggatctccgggtcaatactccgacgaatccagcggcatatacatatacctccgttccacctgcctgcgcccatcccacagactcttcgactcgattctcgtgtgacggccaacccgtctcacaatctcggcgcacgactgctcttcgtgcgattgcatgacctcgaaccgatttcggttcgatcgctcccgcaaatagtcacgtagcatgctccgcagttcaagtcagcttcgtcgatccacgatggctcatcatatcccgtccagtataccaagaattctctcagaacacgtccataccgtgtgcgccgcccagatcgcatgtcagcgatacgctccatctcatactcgtcttcacctagatttgtttcccagctatcctcaggtaatagagcctcgtctaagtcgagtcgatcttggtcttggatcgtcaaggtgaggtgtggtcggcctgggaaggtgcgaacgggcttcagcttggacacgtgcacaattgggaacagtcgatactcggttcctgcgatctcgaggcgagcagcgtacgtgtcaacgacctcaactacacggaaggggtcatgccacatgtgcgcaagtttatgagcgtagccttccttgactcggtcgagatacagccatacctgcattccagcctcgatctcgggtgggcgcaccgattcgttgtgctggtcagctcgatctctaattgcctcacgtaggcgctcattgacttgctgccgggcctgctgatattgcttctggacatgatagcgccacctgcgaggctgtcgatcccgccggcgcgtcgatcccagcgttaccattgcctccagagtagatcgagggtcccacccatgtaccaagtagaagggtgtgtctccacgaatccgattttgggccgtgttgagagtaaaagtaaggtgctccgcgtactcgtcccaatctcgctggttgatgtcttcgacatacatcttcagagcgcgagtgagcgtctgcaccatccgctcggcggtaccattggcctgaggccgataagccatagtcgcacactgtcactgaccgacgatcttgttgaacgatctaaagaagtccgacataaatccaggttcgcggtcatgtcgtatcgcctcgctagctccaaatcggcgaaaaacgcattcctcgtagttttcagcgatcgtttgggccgttcgcgacgagctggccttcgcaatcacgaatccagtgaaaagatcgatccagatcagcaactccgtgttccctttgtacgacttgggtaatgacgggatgtggtccatggcaatgatctggaacgggtaggtagtctgaagatcaccgggagattctccttgtgtagtcggcctccctttcccggtctcgcagtccacacacagccccacatatcgttgtacactttggtagaggcctctccagtgaaaatgggcacgaatccgctggtaggttcttccaatgccttggtggccaccctcgagactgacatgataatggtataggaagtcctgctgcaaggtctccgggatcaccagccgcatcacaagatcacgaccttcatcagagcgcttcgatggcgggcagtagaacagcaatccagcttcgtcgatctcgtagtcatcgacaatcttggtacacgctttagcctccgccgaggtaaggtcctgcacatccccaagtagatacttcttgagatcggcaatccatttctcttcatcctgggcctggcagatgcgctccgtccgcattcgttgtaccatcaactaatccaacacttgtggggctgctcgtctcctccatctcgtaaccgccgcgatcttgatcaccgccgcgtcagatcgaggaaccaatagttcgtcgagccggttgagcctcaccagatcttcgcgcttcccgttgtagtgctgcgcttgcaagtcgatctgcactctggttccagtcacgtttcatgtggagaaattcgtgattaggccaagatcgtaactgtggtgtagtgccccgcgaagaagtgggcacaccgggcgccggaggaagaaggcgccgagatggatgtcggcggacgcgagtgatgaacgcgacgcggattatgggcgcgacgcagggccgagctcgacggaaagtcggcgtgggtgatgggccgtgagacacggtgccagaatccagtgcgacgcgtaatcatccgacgggccgatcagcgcgcccgtttcccccaaacccgtcaaccctaaaccccgtcgagaaaccccgtcgaggaaccccgtcgagcccaagtcgtgattacgttacgcgaatcaggttgaagagcggcagtgcaagcacgacagacgcagggataggcgtagggtggtaggcttagtaagcagtagtagggagtagccagtagcaaggacataggatagggtaaggactcagtcccgaaatttctctgagccactcagacctctcccctccggaagatcgccaggttcttgaaaaccaccaagcgtcggcaagcagagccgcaaggaacacgcggccccccgtcgctcgctgtctcgggcatcccccccctcaaaccccgtgctagaaacgaaggcacgtaaaacgtataccggttaggaggcgctcgataacgcgcagcctagacgaaggaccgcacggcctgataaccgctgtgcacaagaccccgcgtcggcccgataccgccacgcaacaagccccaggaaacgccggcccgataacgccgcacacccgacgggatctccgaggaaacgccggcccgataagtccgcacgcccaaggaacaaccgacgccctaagacaaggaacaagcgtccactcaaccccccaactctgaagcttgcgaagacttgggctctatattcgaagatacgctactcaagatccgggaaattgcccgtcgcgaccgcagattggacgcgtcgggtttgtgcgaggacgaactccgcgatttctgcgaggccgctactccacacaaccgttccatggccttctgacgtagtagtaccaagctcggggccttgcactcgatctctccacgcatctgacggatcaccaagttggagtcaccacagataattaggcgccgccccctgtgcagggtggctaggagatcgaaacagagcagctagccgtgatactccgcctcattcaccgtaagatcaacctggttctccgaggcggccgagatcaccttccattccggcaatcccacacaatcgcgctgtaggcgccccacttcgtttcacacgagctgatctgtcgaagctagccaccagcagttcttcacccatctttacagcgggcggcggcatcgtgatcgcttatcgcgattgtttcctgggggagatcgacgtcaggatggcgtcgacttcttcgcgtggcgttatgctcgcagctatcacacccaagatcatatattttcccttcgtgcacttcacgatcaagctgcccaacggccaaggcgcccttgcagccggatgagtgcaccagccaggccaacgttgagtatcgggtcaggaccttgatctatctggtaaccagttgcgtgtagcagacatctaatatccggagcagtgccaacacctccatatccaccattccatagttgatctcgttcggcttgagcgcccggctggtaaaggtgactggcttgtataccccatcgtgctcctgcatcaacgccgcagagatcgcccacttgctggcgtacaccacgaccactggctcccgatctgggtcaaagtgctgcagaattggcgccttcacgatcttgtccttcaataccgtaaatgccgtgacggctcgaccccacttggcactgtcagtttggcgttcaccagcttcgacatcatctgcgccgacctcaatcttggctttccaggtgatttcgtagaagtcagcctcacgaagttcgtacagcactgaagcgtagaccgcgaagtcctcgatgaacctactgtagtagttgagactatctaagaatgactgcatcgatctcagggtggtcggaaacggcagattggccaatactgatagatccttcgggtgagcctccagtccttccgcagatactcgacgtcccaagtagtcgaccttcttcaatccccaaaagcacttggccacgctgatcgacaagttccattcctcgcagacatctagcagcttttccaccttctcacacagcgtatcccacgaaccggccgtaaccaagatgccatcgatataagatcgacgccccaggacagaggtcttctgctcgacgtttggttctccgtccttgaaaaggtcgatctgtccctgtcgattttggttgcccgtgatcttgaggaagccgtagagtgcgttgtcgatcagtcgctggtagatctgcggcgcgtttttcagcccgaatgacattcgattccactcgtagagcccccatggagtgacgaacgcggagattgcacgagctcgatctgtcattgtcaccacccagaaatcactagccatgtccagcgagcaataccagagcaccttgtcgagatcttcgaggagatcgttgatcagcggtatcgggtagaccattaaacgcgtcagactgttgaccagacggtagtcaatacagagtctgatgtcgaccccgttcttcttgacgatcaccacgatcggtgatgcccaaggagacgttgagatcttgatcatcttggctgacaggagtcccttgattagctgctccagcttctcgcggtactgcggcgccactttgcggcaacgctgagcgactggcttcgcatttccgacgtcaatgtcgcagatcgcaccttttgcggcaggtggtaaggcattgccccttcccataagcggatgcttccggcgccagatgatcttccgcagtcggtcgatttcctccggggtgttttcaccaggatcgcccacttggatgtccgtgatcacaacttcatcggccgtagagaactcggggagtactgctatttgaccttccacgtcttccgcgtagagatcgccaccttccgtcatgcatacctgattcgaccggtcttgggcgcgcgtcaacttcaagatcacacatgggtgtgggtttacgcgtcgctccaccatcactcgaagtcgctgggttctcatccgtttcgatccgccgatcttgattagacgcctgatttgcgcctatcgcaccactgtaatcttgatgagacgcctgatttgcgtccgtcgcaaccactcgatcttgattagacgtcccctgtcgcaccgacggggcatgatcttccaaacattccgtgtcgcagactggattttcagcgtcgtaatcacccgatggtctctccgccccctgcgacgtggagaaatcatggtgcgtctcttctgcgccgaattcgtcgatgttcttcggttcctcgtcgctgctgggcatcgcgtgagacgtggtggggtcgtcgcacgacccttccgggttggagtcgtcggggttcttgggcgacatgtactcggcacgcactgtggccacctccggtcgcttcgcagggcgggtaagatcgcggtcggcgtcgtgtactgaggccgctccacagcaggctcttccacaccggcaggttccggcacatcgtccgcagtgtcggtagttgcttggtacgccaagttctgccactcagcgtagcggcgagatctgacggagacatacccaggtaagcgcggcactcgatctccggacagccacatcgcgagtcgcataccttgatgcagcactaacttgcgttcgctgagatttgtcagttgcaggtaacgagccctgcccgggcctgcagtcacggtaggcacccatcgatcgccacgtgtgacccaaagcttctgatgttctgttggtctcgtgcgcagcttcacctcggtggatccggccacgtcgaactcgcgatagtcggccaagttcacttgctcgaccttgtcaccgtagagtgggcgtcttccagcaagctgaattcgcacctcgtccggcaggcagatggatccgtcggcaagatcaaggcggatcccggtcggcaccatgaagtccatgccaaggattaagtcttggccgccggtcggcgggcccacccagacatcgaagaagtacacaagcgatcccgcgagcgtgatcttgacccgcgcacgtttttccgccatgaatggagatttcccaacgccttcgcactccaatgtctgactttcatcaatgtagcaccccaccttacgagcaaaggcggtgtctaggatagacacttcagcaccactgtcaaacaacagagttgctttttcgttgttgatcttgcccacagttttcgcttgcttgaacttcttgtcgggcacatggtatttccagtaaccacgcgactcccccaacgcgatatccaaggccatcttcacactcgatcttgagtagtcatcaatttggtgaaggcttgacacggcagccgtagttttcttttgaagatcacatgtattgtcgatgagtttgtttacagtcgactgtgactgcttctcaacatacgcaaagatgcagaactgagaacgctcgtttcataccggattccaacccggcgagcgtcttagtttaacatcttctccgcggactcgggcaacatgcccccgtgcttggtgggattgtaccactggcggatcatattctagaattcctccatcggacagctcccttcgtcgtgaatttcgccacaggctttgcagacaaagaggcagcgatccgacgggtgaccacgcttgccgcatttctcgcacgtcaaccgcttccaacatcccagatcatcatgcttgacagacccacaatgagtgcaccgcttgaggggcgcccccatgtcgtttggcatcgagtgttgaccgggccgacgatccggacggttgcgatcttgttccggtagacgccggtcttgaccagaggtgcgatgttcagtcgctccgttgctgttgccagccgcggtcgcgtacactcggcgcagatctccatcttcacccgatccacttgatccagagtcggagtcactagtgtcgctcggtatctggatcgctcgcactgcgcggttaccggcggtagctggtggcttctgacggggcttgatcgagccatacactgtcttgctctgtcgcgcttcggcgcgctggcgagatcgcagacttcttccaggatatccgcatcaggaatccgcagcagggcgagctggtccgctagatcgcggtcgtccaacgtctcgatgaaatgttccacatgctcacgacgcacgtccggcggtccgtccttgacttgtagacgtgtccgcagccccgcaacgttgagtcgatgaaggtactccaaaggcgactcgtcagatcgtttccgagcatggtagtactggcgggcaaccgagacacatcgtccacaatactggatctggaagctctgtagaaggtccttccacgtggtgcgggtcgtaccactcagctggcggtaccagtttcgcgacgggcccgtgagtagatctccgaatactagacacttctcatcatcgggagcttgattgcagacgaaggccgaccttacctttttgacccaagatcgagatcggtcttcgtcgccgtccttccctgagaattctttcagctcagacatcgcagacacgcggatgcgtggtgcggcaccggttcctcctgctgaagtagaagctgttgttgcgatcaccgcacgggcaggtcgacccagatcgaggtcgtcgggatcgaactcccatgacgcagagtgtcggattggtgatccaacagactccatgtccacatcttgatctccggtcggctgcaacttccgcgcggtaccaggcagctgttgttccttccgaaagcgttccatggccgcgtggaagaacgaatcaagcttttccggagagtgatgcactgatgctgctgcaatcttcggttctcgaactggcgccgccacctcgtgctcggcgcgctccgctcgacctcgcagcatagcggcaccagaaggtcctagcgtcatgcggggggggggtcgtcaacactgtcagagtccacctcttctgtcgcagatacgtatggggacgatgtcgccgtttggtcgcctgggttgggcgttggcactggtctggatgctgtcaatctggaaggctcctgggacgatcttgctggttccttccgggatcgacttgactcgccgaccaacggcttcagtagctggaacagagtctgagtcgagttctggatctcgctgagcttcagatcgaacagactttgtgcgtccagcgctcccgcaatgatgcccacttccttgaagagccgtagcagggtctgtacggcagctaacttgtcaggtccagaggtcggctgtgacaccggtcccgcgagatcaccgaggagcttcggccgaaggagcttcatcacgccgtcctgaagtaggaaagcgtggagctccttcctgtagtacgcggcagctagttgagcctcagtcacggttagtgcgagatcgaaccgatcgtcagcgtcggagtcgggagccttcatcttcttccgcgacgacttcgatctcgctggcttcttcttgaatgatctagcactgggtggttgaattccggcttgcgctggtggactttcgtccggcaggccacgattcgcatcgagacctgcgggggtccccgaagggacctggggaggaggttgaggcttttcttaggcccgttgctggaccttcctctgttccgtcggtagagcccctccctaggctctgccgatccgcggatccatcatctatcagcagcgtcgacggcgatccgttctccgtcgacgcttgattcccttgcccaaactcggcttgcgcatcctcttggagggactcacggtgaaatcatgagtcacccaaagatccgggcacgcgcaccattgtggcgaagcggctccgcgaaatttgtagatcgcggggcgtcctcttgcacacggcgcccgaactgccgactaacggagggggtactccgatcttccgtgaagttccgtgaagttgccgatcctcaccttgtgtacccgtcggtgggctggatcgctcttcgggtgatctcgagaagacgcgcttggggttgagtcttagactgtctggcggacagcgggaacttgtggcagcaacgcggatatgcttcacgctgtgccggagtagttgtggcggtttcgatccgaggttgtctggatcgacactcgccggccaggtgtgatcttggcctggggttgccttgtggttggtgtgtaaccttcctttgcttttccttgcttgccgcttcctctagcggtgggtcgaagtgagggttgacggacgctgggccaagctatcctggcgtccgaggttccttgatcttggggtataagtcgacttgcgtagcgtcgggtgggccaaagtatatcccgtgcccggtagtgcaaaggcgaagaccacttgatcagtagaaggtaagaacaactctgtttaaatgttaaccttgcctaagtccttgtcccatcgttctctcacgctcctgtggtccaaccgcacgctcgctggctccctcggcctttgtggtggcgccaccgactctttgctggacgttgacgtaatccggatacaagatcatcattcctttcccaggatcgacgtcacccctccccaagcagatatcccctggtctagatcatcttcgacggggtcactcttctggaggtcggtatcactttctggggagatcacacttgatcttggtggatggcttcagacttcggaaaattctctgttcgctccaccacaccagcgttacccgaagctgaagccccgactgtctgcggatgcacccagcatcaacaatgttgccctcgaaagtggcatcgtcaagctgcagcgcacggaggccctcaccccagcagagcgtgccgcctgcaccgatttccgactctctaagacagcagcacctcagcctacgccaccttcggacctctcgattgtccaacaggcgttcaagaggtgcaaggtggccaagcacccgaggtacactggcgttgtattcgctccatacacctctaacgagtgtgagagatttttttcggcaaccaagctagtctactcggatctaaggaagcgaatggatgcatcgacgctcgagacgctcatgttcttgatgtacaacaaggacatgtgggacgtctacactgttgaagcagtgtcatcgtaagaactatggtcatgtataatggaaactaatggaataatatattctgtggtttctttggtcttcattaataccactacgcaatgttgccatacactggagactaactaaatccgcactttactgaatcgaccccaaaatgagccaaaccacagccaagtactagaaaggactgcagccgtccttaggaccgatagactagctcacctaagaatatacgagcacccacagggggcgcacgtgtagccgcttcaagcgtgtccattcaagttgtgctagccgttaatccatggcactagtatttaacaacataatcgacgatacattcgccgtcctctaaccgagaatcctgtctgtcggtcatcgcgtcacgctttccgcccctacagcatagacttgtcatctcgactgcgcaacggcgacccaattccacctattgtccacttatcgaatcgaatcgcacttaaaaaatgaacgaaattacaaaaaaacataatcaccctaaaactcacactttagcgagcgtaattatgttggcacgaaggggcctgctccctactaaaacctcggagggaccgcagtgaccgactgtatcaaatactcgaccccacgccgcgagtactgcagcgagctccgcgagcggaacgggggcgccctatcattgcctaaacccatcatacccaggcgaagcgcccgcgaagcggtgcgctgagctctagtcctacgttttacgaaggtaccaatccggaacaaatccgcaatcgtgattaacggtgcgggttttctttgcttctttatgatcttttagctaagtagtgtaccgccataaaaaaaatgcgtgaagtgaggtacattttatcgtcggcgctgcgctcctacttcctccgtagtagatggctacattatcgagtttcaaagtagcgaaaaatcagacttttttgctaaagattttcaaaagatcagaccaaaaatcaggcaaacgatgagcctccgaaggaccatcgtttgtctgagtttttgttgagcaaatttggtcaaacgccattcatcgagcggcagcaagacaccacttgaagtcggcgcagactagaagtcgaccaggcgccgcgcgcacatgaagttgacgcccaagacgccggaccggcgggcggtgccttggtcagctcttagctgctgcttggggcacggacggagggttcaaattgttgcccctattgccagcgctggcctccagcttggaggaccaagagcaaatctttacgtcattgcaaaaccaaacaacaacgccgcgatcggctgaatagcaacgctgagacgatcaaaagatcagacgattcattagcaaaatattcttttaaaatcgctactttgaaaccccctattgttagcctaagtccccgaaaaaaaaaaccgctacacctttcttgcttaaacttcatcactagattttttatatgattatgtgccgtgaacgctagctgtggacttttccagctccattaaccgaggtcccaataaaaaagccgatcgttcagagtaaatgacgtttttataccatctcgttgtgataatcgctgtaaaaaaacagcataacacaacgaaaaatgagcagaccacaattgggttgaaaagaattcacctagtctgtacgagcttttcagccaatcagtgcattggatttgcaccacatatttttatgaggtgtcaaatcctatacaataataatatcagtgaagacgggtaatcgtgatttcatactgaaactcagtattttttggcattatctttccatgaggtttttgtgttctacgcatcacacagcagcgattgagtcttacttttgaggttttgaacgctgatttcaatttcaaatatgtataatttgggtagggtcatttttgggtcctcgatcctgtcgactactgtacatgttttcaggaattacattttttggtgggggattgtgcttcgggtgcgttatttaaaaatgggggaaattccaaaaggtgaatcgatttgaaaatctccctggactgtgactcgatacggcactcacctccgatttagactatggattagcactcattaataacaattcgacacgatacttacaagttggaagacccccccccttgaagacattatcgcgtttcgaaaggtggaggggatgaccacgtcgagaagcgtgcgcaccatagcttgtctgcgtggtaaggaagtcaatgcgtgcgctcttacaggggtcgttctgtccttagtgtaaatcggaggtgagtgccgaatcgagtcacattctgggaatattttcaaatcgagtcaccttttgaaaaaataattccgaatcggacccgtaacttcgaatcgaacgtttttgaaataatctaagtgtacccaaagtgtaccaaaaatgtttcctgttatcaaacttctcgctgttcataagttgtaccatgagatatgagataataaatacatttccactatataaaatgcatagattttatataaaataagaactaaacgaagttgattaggaaaatgtatatgccaaagcataggacaatgtattacaatactgttttgttcataaaacaataattgttatacactaggtttattagtctacataaaaaatgtatgaataacaaatgcagttatatgacattttgatacaacgtgttttaacacgttttgtacttgcgaaatggaaaggtcaaacaagttttagcgatcataatcaacattagagtgtcttggttatactctctgaaatataccaaaattcattaaagctttgtacttctctgtcccaccaatttaagggtagttgagtttttttatcataaggttgcccacacaaacaagccaaagcccagcgtacccgcgttgtaaagcccgtggtagggcgctgttcacactattctttttgcaatgtaataacggccctcagcaagtaaataacaacacaaatgcaaatgcacctctgaaagaaataagttttgttttcgtaaatccatggaaagctagcgatattaaacgaaaggggaaatccggtttggggttcgtaatttaaatctaattcggtttggggtccgttgaaattagaaggtgtaatctttagtttaaaattgaaaacttaccgtatttttaatcatgtatcctaatcgtaccctatttccgaaattcaccctatgtgcgaactatgttgttacgttaaaatgtactctgtcaccaatcggtaccctttgacgttatggtagcgtgtatactattgcgatcgtgggagtaacgtgccgcatggaacatcgagacgagtctaacgaacctagcgattggtccttgctgcttctgtagtgcatgaggagatgcatgtcaccgtgtttctcgcgcagttggcaccttgcaattcctgggcggtatgaattctggtgccagccgtccacatggctgtcgtacaaccggcaattctccttgaaacctgcagagccagttcgcatcaaaactcagccatcagggcaactacatgggcaaaggaaaagggatgacaatacgcacagaagtagagtcggtggcaacagcgccgacgagcgtcgttaccacgaacataccccggaggctagttcttttgatgtctctgcgagagggagactctaacgtccaatcctggagcatgatctgccccaactgacatgagttaacgaaataataaagaaatagaaatagaaatgcagtcaaaggatgaaaattttccacgctgccgacaagggggcgtgaggtaatggagtgtcggaggggatactggaggaagaagagattgcgactctggcggtgtctccttccagctcgtcaagcactctgtgaatgtacagcacgccaggataatatcaaacgtggaaaggaaggtatggcaagtgagattagatggcttagctaaatccgattctgtatggtccacttaggctcaacgttacgttttagtcatagggtacatacggggcacaagttacagaaatgtactgtgtacggtagagtacgaataaggtatacttcttaatcacccttggaagttttacaaaacacggtaagttttcaaattttaagccaaagattacgccttctgatttgaacgggccccaaaccgaattagttttaaattacggaccccaaaccggatttcctctaaaccaaaaggttaccacgcgattgctccgacttggcgactctttacgcaatagcacacgtgccagaaacatgcggaacactccgtattaggcactcgaatttgtgaggttttattgcctgttatgctggtttcggtcaaatcacatgataattttatccaatcaatgcgcttcaaggatttaggtacagatttatcccttttgtgaccaaaaggtgcatttcgacccccttgatggttgtttcaaacctgcgagtaaacccgccatgaagggggccaaatgcccccgttgacagaagttcaactacgagcccacctatttttaaaaccatcaatcacagcgagctcggctcccccaccccttgaatagattacgctgtgtggcagaacagtaaaatacgcgtttaagtacgaaatttatgaatattgcgtcagccaataccagtaaatgacgagttgacgatgcacacgtagcttcaatgttctcgcccctatcgctgttacacacctaacagtaggcaggcccgccttcgcgtcaaccacgagtagttgagctagcacggccagcgcggagtagagtcttcagctactccgtggctggtgccgagctgcaacgccaccccgcgctccgtccgcttcatgacgctcaccaccatgcgccgttagagctatcaaaagtgatgtaacgatagatacggtatatcgagttttgttggaaccatttttcacagtgaaatgcagtaatatgtacatgtatatttcaatagtgaaatcaagatatatactcacttcgcgactgtgtctgggcttgaagctggcatggtgccaggagctggtggtctgcagtggtctgatcaaagtgaaacgagctcctaccaagttggccagaagtggcgggtgtcgcggtgggcccgcaaaggcgctactgacagccccatgcgtcaccagcgatcgcttctagcgctcgtagagcttgcgccagctctgacgatttcgcgccaatatctactattcatcacattacataatggcgcgaaatcgtcaggaccagcgcgttggtgtgacggcgagcatcctatcagctcgctgcgccataattaaagctagacggtaagattcaaagttggatctgtgatatctttcagggatctgcacgcattacgtgaacatcctgttcgatcgattgcgaatcacatcacttgctttagatttggtttaagattaccacaccattacccaatgaaaaaggcaacaagaagtaccgtaagttgtcaaaaagaggggggggggcaaaatgctcccgttcacaatctccataccactgtgtggaagcgacactcattggggcgagtactgttgtttaggaaagggggcaaaatgtccccccccctccttgacgagctaatgtgctagtatgtaaatcatacaaaaccaagtcaaaaaggtgtgttcacgaaagggttaaagaattaataatactcagatttaaaaagtgactctattgattaagattctgagacctcagtgccttgaagcccttttctatagttgacgctatcgtttcatcgcattccacgtatcctccgccttgaagcaaacagacatgtcggttgtttgttttcacgtggcaagctgtctgaactccaacgcatcagaggaataagacctagggtacttcttgcaattcgggtccacgtggcagtaaacgcgaagcttagatgtcgcgaaaccattttgcaaaaccgtatctgcgtgtgaaagcttggttttgtcgtgaggcacaccggctaggattcccttgagatgaactatcattttctgcgtcgtgaatccggaccccttcattttgaagacgacatccatgggccgtttgacaaacgaatcacccgtaaatccaaccccagcacattcgaagggtgctgggtcatttccaagattcacgacccactgaccgatagtagaaaaaaatctgcccatgtatcttctccgcgtgcactccgaaatggcccaaagataaaaaacagggatcgagcttgacgcggaatactttcgagcctgcaatcgctaataacactagatgcagcaacaccacaaacgcgtggtccatgagcagagacccgacagattggagctctgctaacaatcgcttgcgaagtttagtgacgacttaacacatccgttcttatgcgagaatcgcctctgaagattgctcttgattctgttgcgagactttctcgcaatctgctccaccatggcattcgcaatcttcctcccccccaccacacacacacaccacaccgtggacacgggtgtccacgcttaacggtcgaccaccgggtgttagtgtggtaattccactaaaattctcctctaccaaaaggtattagagacaccaacaacacgctaacccgcaaaggtaagcgcttattggatcaaaacctgaagaccaggaacgatcccttacaccgggtcggttgcaagcgcctctgtgcacctgaggttgtcttcggtcaacccaaaaatacctgtatcactagccacgagcttaggctaggatactatgtagcgctttcgcgcaaccccactgcagtctgtagtgggcctaccttggctcactactacggcttacacgtatgcgcacgtgtatgaggaaccgtaggtttcttttacttgagttaagtatactcgagatccacgagtatactttaaacaagataaagactccaagtagcgggttttggtaaaagatgagaactgctatttttgttttatgtttctgacttcctctaaatgtaatattgtaagataggaatctgccaacggctggttggcagaattccaatgctatgcatgtcgctcattggctaagagatggtgctctcagccaataggaatcctaagtctctatggaccacccgtcgtggtggtcgtaaatgtatgtagtctttggtgtgtctacaccaaggtcgagaaagtctttcgaacctctaacagacgtcgtatctgttagagttacaagtgactgtagccacttgtgcgtgtaaccctgttacaccattcccccctcaaggttagacgcgccgagttacggcacgtcaatcaggaaattgaccattcgtcaattcttcacgttgggagaaagaatactcgagctcattccgcaatgagctcgccgcagaagaagactgccgccgcaacagagggtaacctctctgttgctcagtaccatgagcgccagcaggcaaagcgcgacgcgctcggtgcaaaggccgcgtcggggacaactcagtcggagatagtcctcgaaggttcctctgtagtcaacgacgccgttgactatgggagtgacgacgtagagatggaagagggcgaggcctcttccaacaagcgcaaggagtctatcgacagtgatagtctcgacccggcatgcgggtcgagacgccctcgtgaaggagacgactcggacgcttcgagctcgaagcgttcgcgcggcgagagcgaaactccgctctccgctgctggggctttaagctccccgcgtgaggtggcgtcttcaagttctccgcgcgctgctcaggcagcgcgcgatccgtggatgccgtctgcgtcagagatcgcagaccgtgtgggcaacaccgtgcctccaaatgaaattccgctgtacgtatgcagcgggatccacgatgatgctgtggcggaggagcagcactttgatccgttaacgaattaaaggcgcgattactatatcggactctttcatgagctccgatacttctccagcaagaagacctcttctcgcagcaaagtgcatgagtggcaggcactttgtcaaagttggaacgcttttgttgagaacttcaacaagaagccggctgcttacagtgagcgggttaagcatgcccgtgagcacttcgagacattctcgacgcgcgggaggctggagcagctccatagatcttctgtggacgctggtattccatgcgctgtgcccgaaggccatcagtgcgcgttgtggcttccgggtgcggcgcgcttgagcgaccgcgacgtaaacgggtacacgacgattcgtgtacctgcgagtctcaaggatctccgtgccaagttcttggcacgtgaggaacgcgacgatcgtggggcctcgggcgctgtaagtgaccacagcgctcgcactaccttcgcgtcggcagtgcgtggtgagcttcgtactccctcaccatttccggaacgtcctgcagcaggacgtcctgtggctcccatgtatcttggtggggcgaaaagcctctccaacgaatacgataacgaaccggctgccggttcgttttcgggatactatgtttcacaatacgctcaacaatccagcgtgttgagccgcgggcatcgcggatcgaaggcggcggtggtgggaacacgccccgggtatggtcaacctagggttgaccttggcccgacgctcgaggagcgggtcgctgctgtggaacagcatcagagccgggagttcgccgctctaaagcaggaggtggcgatcctgagggctcaagtcgctcaggccacgcagaccgcgtctgacatctctgtcgacgtgggaggtcgcggcgcacgcttggcccagcgcgttcacgcgctgaagcagcggttcgatcccgctggggcttccgcttcgggccagccgagctaggtggctcgtgctgccggtatggcttcagtcgcccgacgtaaaaggtcggatggaggcgcatgctagatggaatatctagcgtgtaggcgttgccatgccgtgccaacaccgagaacggcccgatgaagcgcggagcgagcttgctcgacccaaagtcggaaacggcatgtttaggcaggttttgagttgctaacaaaaccaatgaaccctttttgaattcattagtgttgcccctaccaacattgtcagcgttcagcttctgtcgaccgacagaagctgcgatagcgtcttggacaaaccgaatgacggcttgtctgcgctgcacgaagatgattgcgtccgagctgaacgagttcagctcgtttcaagcagtagacccggcctctgcgtttgtcttcgcggtgtctgtgccctgcacagacccgttcttcttcttcgtcttgctcttgacggcgtctgtgccctacacagacgcgtgcttcttcttcttcttgcgcgtattcgcggctgaccctgtgccagtgtcagcggcactctgcggctgctgtgttgcagtcgtgcagaaggagccaccatcctgagtagactcgggaggcgtgggtcccttatggcattcacatagaacggtgtatgtccggtcgaggcatgcactgagttgttgatggcgaactccgccatcgacagacactcgctccagtgttggaacgagtgagcgtagctcttaagcacgtctacgagcacgcggttcacgcgctcggtctgcctgtctgtctgcggatggtccgcagtcgacatcgaaagttgactcccaagaagtgtaaacgcttcttgccaaaggtgtgcagtgaagcgcgggtgtcgatccgacacaatgtcgatcggcatgccatggtgtttgaacaccatgtcaacgaacagacgcgccgtctgtttcgcagtcacttcagcgggtactgcagcaagatgtaccatcgtgctgaagcggtcaacaaagaccacaacgcccgtgttcccctggctgtccgggggaagaccgaacacgaagtccaaagacatggactgccaacactcccgtggagttggtagtgactgcaagggagcctgcgcgaaaggcgcaggcttcgcacgttgacaaacctcgcaagcacagacgtacttgcgcacccatttatactggtgggcacagtagaagtctcgcgtgagaagaaggtatgtcttctcacggcccggatgccccgcagtcggtgcatcgtgatactcatacatgatcctgagtcgcaggtcatggacattgggcacgacaacgcggtccgcgttgtcgtcgactgcactgtagagtaataacccgtcgtgcacctaacggcgtgcacgagcacgaagatgcttcggcagcttctgacgagcttggtcagaaggcgctgagccgtaggccagcaagagcttcgcgtccacgtcgtccgcgcacgcgaccttcacgtcgtccaacagtgacgacgtcggggtgctcgatcgcatggcgtcaatggcattgacgtcggcatcagccgtggcgtagtcaggtcgacgcgagagcgcgtcggccaccacattgagtcttccgggtttgtactcaacccggaagttatactctgccaagaatgagagccatctcgccatccgttgcgagatgtgcggcgacttcacagccgtccgcaacgacgcgtggtccgtatagaccacgaacggtttgcttccgagtagatacactcggaacttcgcgggtgcgtacttcatggcaaggagctccttgtcatgtaccgggtagttgcactcagctggcttcagctgacgcgattggtagtagacgacacgatcacgaccctcgtgatcgtgctgcatcaacgcacatctgattgcgaagtcggatgcgtcacacacaacgtggaatgggcgatcttggtcggccaccgccaagatcggcgcctcagtcaagtcccgcttgactgcatcgaaggcctgctgacactcagcagtccaaacccgctcggcgtccttcttcaggagctgtgacagcgggcgtatcaagcccgcgtagtccttcacgtacctgcacaagtacgtgaccaagccaaggaactgccgcagttccatgacattcgacggcgtcggccactcattgatcactctgaccttctcagggtcagggcggacaccgttcttcccaacaagacacccgagcacgggtatctcgctcgccccgaagatgcacttcttcaggttcgcatagagcttgtgcttgcgcatgagcgcaagcagcttccggagatgcaccttgtgcatctcaacatcgctcatcccgtccgcagcccggctgtgggcgaacacatcgtcgaagtagctcggtgcgaaatcgcgcgctgagcgcaacaagtgcgtcgcgcacctgttgaaggtcgcaggggcgttcttcagaccctgcggcatcactagctattcccagagcatgccgctcggcgtgctcactgccgtgagagggatatcgctctcacgcatgaggatctgatagaacccatcgcgcagatcaagagcactgtagatagtgctcctgaccatcgaatcgatgataacatcttttcgaggtatcggcgtctgcgccggatcgtcgcatcgttcagcttgttatacgcatgaacgatgcgccagccgccctgtggtttcttgacacagaacgtcggagcactgtgcggggatttcgattcccgcacttgtccagctttgcgacgactttcgaagaagtcgtcgatcgctttgacctgctctcgcggcagtggccactgccgtgtgacacagtacttcgtgcccggcacgagatcaatctcgtactggattcccttgtcctgcggaagctccgcaggaatctcttccggaagtacgtccgcgtactcccgtaagatctcgtagtagggactcgttgaaacaacgagtcccaggtctgctcttcaaagcgctccttcttcgtcttcgcactgatagtgtcctcgctctctgtggtggtctccatgaacaactgcctcagttcttcattctcgctcttcgttctctcggcgtccgtgagaatgtatatttgctcgatgcgtccatcgtgcaagtcacgcgcgaagcgcttccagctcaggactggaagcgaagtcaacttcgacgcttgcgtcggaggcttagcgagagtcatctccctgtaccggaacccggcacaggaacgcgtcaagacgttcaacgtctcaacgtccggcttctcagcctccgtctgcccggcagacattccttgtagcgtctcggccccaggccgagacttgcgcagcgaccttcgcatgcgccgtcttcttgttttgcggagcccggcaccgcttggttcttgacctcgtccaggcccagccgtgaacgggtgttcttctttagtaccgccggcgggctcatcctgcgggcgagcgacttcaagcccggcttggtcgcccggcgcttcgtcgtgcagcccggctgcacgacagcatgcaagtttttccggtgcgggacgtttgcaaccgtccgcaccgcctgcagcgtcggctcccggtgccgacacgccatcttcatctcaacgccaaccattggcggagacccccattacggagggtgcgtcggctccccgagccgacgaatcaaattcacccaagccatcgactcccggagtcgatggcgttacgtcaccttggctcttattattggccagacctgatccaatcagattcgcgtcagcctccacggctgaggcgtgtgactcgtctgcgtcatccgtgccccttgagatcggagactcttcctgattcgctgaaaagcgggtgtcgatctccgagatcaacacattttctccttcagccgtcggcggcgatgccgacgcttgctgctcttgcacgcgagctcgcgcgcgcccagggcgttccgggacagcggcattaggcgctgtctcgagtggggagtcgcgcgcacctgtcggtgcgtgcgtagcggcaacagggccatcgctcactgttccgctgtcgcgaccgaagcgcacgagggtgcgcttctcccaatcgatgaccggatcatgccgtgcaagccacggcatgcccaatacaatgtcaaacttatcgtccagatccaggacggtaaacgtctcgacaaactcttgatcttcatacgtgaagcgcacgcataccatgcgcttctcggtcttcacgacggcacccgttgccagtcgtacttccaacatacttcgatgtatctttaaatccgcgaagtcaagccttgatagacttcgcagtcgaacaaagttcttcgacgcgccagaatctaccaaaccacggagagagccgcttgccctcatcgagttcacattctggatgacaaggtcaggcttgtcatcttggttcgtgcagtgagaatgaacctcactgggggctgcagtcctcagtgtcgcgtgtccaaggtcgacacgcggaactgcattaccagtagggcgccccgtgcctactggcgtccagcgttttttgtttggttgcgacggtgcccggcaccgccgcgatagccaccctgctggtgcacgggggccgtgcactcccgagcaaagtgaccgattctaccgcatcggtagcatcgcacattgctgctccctcatgatgaatcccagagcaacaccatgttgctctgtcggcgttagcgtaggcagcatcgtagctacagccgcctcaccaatgactgttgatagtcgttggagagcttcccactctgggtcggacaggtggggacagtcagcgcgtgcaacgtgagttgcaggcgtagtggagttttccatgtacacctccgtatccatgggaaggttctcagctccgcgttcgtgcggtgacgtacgaactcaggtagtcggtcgttggacggactacaaagtgctaccaggtgtagtgggcctaccttggctcactactacggcttacacgtatgcgcacgtgtatgaggaagcgtaggtttcttttacttgagttaagtgtactcgagacccacaaatatactttaaacaagataaaggctccaagtagcgggttttggtaaaagatgagaactgctatttttgttttatgtttctgacttcctctaaatgtaatattgtaagataggaatctgccaacggctggttggcagaattccaatgctatgcatgtcgctcattggctaagagatggtgctctcagccaataggaatcctaagtctctatggaccacccgtcgtggtggtcgtaaatgtatgtagtctttggtgtgtctacaccaaggtcgagaaagtctttcgaacctctaacagacgtcgtatctgttagagttacaagtgactgtagccacttgtgcgtgtaaccctgttacacagtccctcagaaaggaagggtaccggcgtgttaggccttatacagggggaccaaggtaaaacctcggtaggtagactattacactcagggatactctaatcccacaaatatatactgaacgatactctaataccgttcctgcctctccggccacgccaactcttggcgctgccaaggaaactctcggtcaatgcacgataagctccccgacaggcatccacacgcagccgagcgtgtccaggcactacaataagctagctacacttaccgaagtcggacttgacccttgttggctttgggggaagactgtctttttattactgagtttcctgaggccctgggggcctcgttctggccatcctatgatgagtcctatgtccctatacaaatatctagtgtgaacgatcgcaataaggcgattccggacacatcaaatgacgaccgcggctacactaataagtgcggccgaagtacgtaactaaatgcatctgtacctaaaagtgggtaccatgaagcctcgttcggggttctattaggacccgacgaggcttcggccactgcctgtcactctaccgaggataatgtcatcatccaatcagatgcagccatctccgtctctcgccttgatcgccccttgattgaacttgattgtcgggctggcgggtcaacggcattggaaactgccactttccaataccacaactgcccccgcctcgacgcgagctcccacgctggtgagcgtctaggcgtcctcagttcttcgactccatggctcctcagtcgcgtgcattcgccgacgcggctgccgctgctcttcgggctctccagtgctccggaccggtacgttcgtcgctcccgctgctcctcactgtcatttggatcctcgttgactccatctctttcttgatcatctcagggagctgttgatgtcgccaccgacacttcgggtcgtcgtccggcgcgccaggctcgttcggcgggtgcccccgcccctatcgccgctggtgctgtgcccccagccccggccgcgcctgcaggtgaccctacgctcattcctgccgcctccgggacctcggtcgaccctccaccggctcctccaagtagtccttagtctgctgctggggcgaccaagactccctcgccggcagttcccagtgaagaggctcccgactcgccgccgacaccgtcgccaactcccgcgccttcggtcacgttggcaactcgcggggcgtcggtggggggggcgaggcagctgtggggggtcgcgccggagctggtgctggcccggccaaggttcctccgacagtggtcgtcttgggcgagcagcagatgctggaactcgctcgtctcgtcgtgggtgttgcccgttcacctccagctcgagtcaacgctgctctcgaccacagcctgcaagctgctactaacgtcggtgaggtgctggctgctgccgttgctcctccgcgtctccctcttgcggaggctgatgaacgggtggccctccgccgcgagaacgaccggctgcaggcagagctctccgacgccaaagataaactcgctgaagaaatgaacctgcggaccaagtcggactacttcctcgtcgcggccaactccgagtgcgaccaagctctggacctcgtccaggacatgcgcgtccagctcagcaacgccagcgctcagttgatgcaagcgaacgcggccatcgctcaccacgctgacgtcactcagtcgttggagaagcggacctcgttgctgaggccgattcggccgctgctgtacgtcggaacacccagctccacgagcgtataagtgcaagcctcgttacctacaacactcagttggagaggcttcggaagcagttggccgaccgcgaccgagcaaacgtcatccccgcacgcattcaagcgttgacggacgagaacaacagcttgcggcgagcgaattctatccttcgtcggccctcagcagcacccggactcgacgtcgacaccttggtcctagcctcagccggcatctccgccgcagagattgattggaatcttctcgggctgtccccaccgacggtcactgttgagagtccacgccatgacgaatcctcgtcagaggagggagaggagtccaagacgaccgacgtgccgatggctgagtccaccgaggctacgtccgctcccgctgcttcggtgggcgcttctgctggttccccggtctccactgagtcgtcatcgcgcaagcggggtcggcaaaccgagtctgctttcgtcgggaatacggcatcccagcctcctcctcacaaacgcttcggcagaccgccagtcaacctgagggccagggctgcagcggccgccgcgccatctagtcctcgttcggcatcaggaggagagatttccccgcctcctcggtcgatggtgcgtcctccaacgacggctcgctcaagctggttggagtctcagcctctcccgtacgaacactcagacgtccccttgtatcctcggctggcccgtcgcgcctcgcctccctcgccagccccagcagcaggaatcgtctgacgtggcgtttggagggggtaagagtcctagcgacacttcacaagatgaccttgagcccggcgagattccgggggtgtcggccagcgctcagggtgttcaaggttctgccaccgagccttccggtactgtcatcgaggttccatccaagggttcgccttccgcggcggcttccattccttcgccagtctcgtctggtacagccggcgtcggccgtgcccctcgagaatcggctgctggggtcaccgagggctctggcggcccgccagaccgtccacctagcggtgagtcgcctcatgagtccgagacttccgaggaccgcgcagcgttgttcctggagatgttcggccccgacgaaagagaggaaacctcggtggcgcaacctgtcgctccttcggaggctccttctcctctggttgccgcgaccggggttcctgtagcttcacaagcggccaccgtgccaatcccgagtcgactccacactcggtcggcctctgttcacgctcgggcgatggtaacagcaacggtgacagcttcaccgagagctggacctgcgtcgattgccccagcagtcgttgacgcttccgacgtagctcctggatcgcgtaagctcagtggtcttgctacccgccgggtttcacggcacccggagcgtcggaatgctggcatctcatccaaaacgccagtgtccccctcgtcttcgaggacgacttggtcgcccccagttcagtggatggaatcgtggagtttggcttgtggacggatcctgctcaccccttccaagtgttgcgccagcttttcccagacgagccttgtttgatcgatacgacgggttttccatcctcggtggctatatcccgtcgtgcaactggtcggactcttctcgttcgcctatggcggcagttccaggggtactcctaccactccaccgagaggggcgaccttggtttcaccttgtgggagcgtcgccactggattaggggtaatgctgtcaaggcgtatatcgacaacctcgccagcaccctcggtcagcgcaacgtgcaagtcctagcgcttcgacaagcgtggtccaagtaccaccgagagcgcagttatcgtgcagatcgcttgcgagaccagatgctccacaaggtgtggaatggggccaatacgtacgacggacaacctccacagcaccgcaccgaggttttgctggagccgtcgtacctgcaatactcgttcaaggtgatggagtgggtccccactaccgacgactgggtctccgaggtggcggacgtggatgcccgcgagccgtgacgtaactgttggttccaagcgccagcagaccacccctacaacacggctttcgccccttgcaacgacgtcccgttgtttgtccccaacggatcgactcgggaaaccgtggcgtcgtcggtcgtggtcgaatcttctctgcggacttcgatggtggtcgctccatgggtggccaaattcgcaaacgctcgtcgttctcgctctccaagccccgatgaggagacgaaggagtcgggtgaagcttcttccgccgccgggtcaagtctgggcgtgttggctcaggctgtgatggagatttagcctcgtcaggccccgctccagcttcaccgtttcgttcacgttcttttccaatgtcgaccgagttccgtggcgctttaggcgacgctgcatgtgctatcccaatccaaaataacgtcatgttgttcgttccatttcataatcttttctcgcgtcaacgcacatcgcattcaatactcggtcgcggttcccagagcttcttctctgccctcgaccgctgtggctgcctcaaaccaggcttggatcgtagctgcggcagccgggcttcgtcttgtctccctgcaagaagatcgggcttatgctcgttgaagaccggacttgattcgcgggagaccgggcgtacttacgctagctccgttgcgggtatgttttcgcatgacagcccaattttgacaactgtacacccggtctgctgcgggtatccggtgtcgacagcttgcatacccatttcatcatcaactccatactcaaccacgaagtcgagcgcacttgttcgtgctacttccatggcaatcactgcgtctgaagcctcggtcgccctcccatttgcttcatcatcacttgtttcgtctgttgagggtttgaccgaggcttgattgcgtcttccgttgtccctggctccatttcgatatctccattccatcgtgactcgttcacttaacacgtaacatgcagattccagtaactttcttcgtctgtcactgcgagctggatagccctcgcaggcagttcaatcatcatctccagtagcctcgttcgtctgacatcgcgggctggattgcccccgcgagcagttcaatcctcgttggggcgcagaattactcctcgtcggccacctggaccatttgcaaacgtcggtcgcttcgcttccggcttaggtaatcgtacaggagtccaccgcacgagagattggacgctggttcccacgtcggctcgtcatagccgacccacttcaccttgaactctcggacggcccggtgagtgctcgttgacaacggtgtccggtcatcgaggatagcctcgacttcatactcgccgtccaggcggtccggctcaaaactgtcctcaggcagtaattcctcgtcgatgtccagacgagtgtcttcggtgacctcacgagccaaacgaaccctcggtcggccttcgaactcgtccactgacttgagtcgtgaaacatgtaccaccgggtagaaccggtatccacttcggttgggtaattccaactcatacgcaaattcgtcgaccttcttcttcacgcgaaacggtccgtgccaccgatgggctagtgtcttggtcagtcctggtcgaacccgctccatgtacagccacactctgctcccgggctgcaaagaaaacctcgtcctcgtcactgcagctctactatggtcaggggaactcggtgcccggtcgaccgaggttctattctcgttgacgcctgccatggcttccttctccttcctgccaagcgacgcattgtgctcttcagctctccgagccttttccgcggcttggtactccttggccatcctcagggcgatttcctgctatcggttgacctctcggcgccatgctagcgcgtcagtttggctaccgaagcctcgtttgagcgacgaggacattgccttgagcgtcaactgtgcatcgcacccatgaacgaggtaaaacggagtttccttcctcgtcgtatcacgggagctattgatggcgaagagcagtctttcggcgatctcgtcccgatcctgctgtagtgggtcttcagcgtatacgcggactgactgcatgatcgtcttcaccgatctctcctgctggccgttggcctgcgggcggtagctcagggtcgctctcgaccgagactgcatcatttccgcgaaggcttggaagacctcgctcataaatcgaggatctcggtcatgaccgatcaaggacggtgctccaaaacgtcggtagacacactcctcgaaagcttgcgcaacgagtaaggcggtagtgtcagacatggctttgcccatcacgaatcccgtgaacgagcatttgaagagcaggatagccgtgttgccacggcgactcttcggtagcggtatcacgaagtccatagagactagttggaagggtctctcggctaggatgttccctggcgagtacccgcggaactgaggtcggctcttacttgaactgcagtcagggcacgacttaacgtgtttctccacatcggcatactggccgatccagtaatagtctctcgccgctcgatgtagcgtacgggtaataccttgatgaccgccttcaagtgagtcatgacagcattgcaggacctcttggatcatcgttgtgggcaccacgagtctcatcttcaactcggcttgctcgccgtcacttgaacgacggctcgttcttgcgtaatataacacatcgtcctcgctcaacacaaattggtccgccattttccatgcatctcgtgctgctctgtatccaatcttcgcatcatctcccggagcactgccttcagattcgaccaccgtaactcttcatcttgagcggaggcgattctccttcggcgttcttcctgtactaccagcgggtcaatgtcttctgcgttcggttgggctggtgacgtctcggcacgcagcggtgaagcttctgcttcattctgagactcgttcggcacaccattggcttctactcggtgagatgcgtctccctgatcggtgaccgagacttcatctgcaaaccggacgtgtttctcctttgctctcgtttgacgtctggtcatcacagctacgtgtccgggttcagtctcgttctgccgtctgcggtcggtttctcttcgcacaaaatcgacaaaattcttgctacgaggtttggcagaagctaccacggcccatactgtgttggccgagggtatgtcctcgacgacgcaaccgtcagcagcctcgtagatgacttcagcgatatcatcagctctaatactcggtcgtccgaggatactaccgtagactccttgcactcgagagtctcgcttgccagagagtcggccgcagcgttaaactctctcaccacatgcaggtacttcaccgaccgaagcttggccgtgagttcttggtggtggctgagttgttgcagcaatgactccttccgacaggctatcacccctagggcttgctggatcgcgagcctcgagtcgccaacgacaactagatcgtcggctccatgctgtaatgcagcagagacgccgttgttcatcccggtgtactcagcgaggttgaccgtggtgttctcgaggtaagcgctcgcagcaagcactactgtccactctggtagcttccatagtatccacgagcaactgccgtatccaccgttcttctcggtcttcgcagacccgtcaaacgacataacgacgcctcggtaggaccgcggtaggcgtgcgtagagcagatgcgggtccaaacgagcagttggtggccctcgtgtccggggtgtgaccaacgccagtgacttatccaagtcaacgaagttcgtcaagccggcttgaagtagctgagcaaacgaacagtcggtttctttgactcgttcgaccaacaggtgccacggcgacagcaagacggcgaactgggtagcccgaccgaacaatgtcttggacttgtggacccagtcgagtgtcgaaaaccgagtgtagacccggattcgctgtccaacgagttgagtataacacaccttcagtatcagcaaaagcgcgaggacctctttctcggccgggtgataattcatctcagcatccttcaaaacacgtccgcagaagcgaacggggtgtagtttgccctcgtgctcttgcatcaacgtggaacttagagcccacgcgttggcgaacaacatgacatgcacctccttcttccggtcgaagtgtcgtagtatcggtgctgccgaaaccttctgttggagcatcgcgaagctgtgcttggccgcggtgaggtcacccccgggctggaagtcctcgtccttaagctggtacagcgctgctccatagaccgcgaagtcttggatgaagcgactgaaatagttgagtgccccaaggaaggactgcattcctttcctcgttgacgggaacggaagctcggccaccccagccagcttcttagcgtccggtcggataccttctgtcgagacttcgtgggacaggaagtctaccttggactgcacaaagatgctcttcgtgaagctgatactaatacggcactcttcaaaccgtgccagcaatcggcctagcgtcgccaagcacgactcgaaagtctcggcaccgaaacagatatcatccacgaatgaccggcgactgaatactggtgtcaacgaggagtcatcgggctccccgttggcgaacatgtcggtgatagggctgttgaccagttcggctacagctcccttaccaagcgagttgtctcggtcggcctcgaacttggtccggaatggctttgccgtgccagtcgaagcctcgttcaccccagcatgagcttccttgtcatgttcttcagctagacgcatgcgctccgagaatttaaaccatcctcccgtcggttggacgaagccccaaagcgcgttgtcaatcatgcattgatagatcatcggtgcgttcttcaggccgaaaggcatacgcaaccattcgaagtgccccagtgcgcagacgaaagcagagatcttccgagctcgttcggtaatcataatggcccagaagccgctagcggcgtcaagcgagcaaaaccacaagtacgcctccatgtccgtcagcaagtcatccaccaggggcatggcgtactccataatctcggtgatcgcattaacgagtttgtagtcgatacacaggcggatatccaccccattcttcttcaggacgatgacgattggcgacgcccatgggctgtccgagaaggagataagcccggccttcaacagacccttcagcaattcgtacagcttaccgaggaagcgaagcggggtccgccgagccttctgcttgattggcgcgtgcccctgtacatttatgtcacacacgaccccgtaggctggaggcggcagggcgttaccgctcgcaatcatgatcttctcgtggctcttcagcacatcgaccagggccgtctgctgcttcacgctgagttcgtcactctggacgttttgccccgagtagtccagcgtcgtctccgacgcttcggttaggtccggcaagaacgccagctcttgcgcgtagtcggtaagctcaatctcgttcgcgacgtgctccgaaacatcgttcacggtgtcgtcaccttcgccagacccttctgcaaccatggcatgcatgaccgatatataggtcgcctccagtagctgctcggggtcgtcgatcgcacttagatccgaatcatggaattcagtgtcggcgtcagcggtggaggttccggcttcagtaggaacgtcgttaggccctgggtcgtgttcaccccagtcgacttcgctactacacaccgcagccgtcgtttcctctggctccaggctggacgcagcggtccctgttggcaggacatcccatgtagttgtctcggccactgctaccacgtcgcggtcatcctccgaaccgtcgttcttcacgctgtcaccatcactcagctcatcactggcttccgatgcctcaaccgaggcggatgtcgctccctggccggtggagtcagcaccactgttcggattcacgggcaggcaacccgctcggctaggcggcgagtctccgggtacgtccgagtcatacgacgcgctggcctcgtcgtccgaaccatcgttcgactcaccagcacgatccacatcggttgtatcagctcgagcgacatcgaccgagccttcactgaccctggggtcgtcgtcgtagccatgtacatcgggtgacgagtactcatcatccaacggagcttgttgatgtccttctggccatggcggtgcatccggtggcctcggcaggatctttcgcggcgtcgggtaagttcggcgctcgaccgcaggcggctgttcagccaaccattgctcgtagagacgacgttctcgtccttgcagagtctcatcacgactcgttgaataggccaacacctgccactctttgtacttgttagagtccaacctcgcgtagccggtttctcgcggtggttcactatgcggtacccacagcaccacggagtcatgcttggcgcagtgtcgtaatattggtgagccgtatccacgtcggctgcccccgtcgaaacctcgttatggtcggcacgagcttgcccgtgcgtcgtacccacacatcgtactccgaacgaggtagccgctggcgcggcagtcgaaactctcgccactcgcgaccgggtacgtataaatcctcgatcggcccacacgaaggctgcgtgccgtaaggttcgtcatcttcagcactctgcgactttagcagtggtaccatgacctcgtccggaaggcgtgcggtgccatgaaatagatccagccggattccagccgggatcatgaagtccatcccaaggatcacatccaccccggcactgtgatccattatccacatttcaaattcgtagacctgctcccacccgagggtgatcttgacgagcgcccgtcgccgggtctccatcacccctgggttgatgcagcggacttcgagacttcgtccgtggtcccggacttctcgcacacgtagccgcttggcgaagctggcagaaatcacactaacattcgctccagtgtcaaggagtatcctcgttcgcgcgtcgtccactgcaccattgaccaaagccctcattcgcttcctcttgtcgtatcgttgggacgaccaccaccccgtctctcaccgggcagtaatttcaccgcccaaacgaggttccgaggtggcccccttatctgggctaaacttgtgatcaaagcctcggtcgggtgtccatcacgttcatcatcatcatcttcatcaataccaatcgcaacgagacttgcgtcccggttctctccattttccgtcggtttcacacgttcattgttcttcagggcgtcaggccgtttgctttcgcccgtgaacgcgaacagatagtccgcatcaacagcaggctcagctaactgtggcagcccgattgggaccaacccagtttcagttggcgggctgtctagtttaaatggcttccatccaccaggctttgcagctctggtgacagatccttcttgtcgaccttggacttcaggagcttggtgagctcgtggagtgcttcacacttcccagcgtcgtgcacctgtttgcacagtttgcaccgccggcagcagaagtgcaccgagtgggacgggcttccgcacgcggcacacggcccatagcgtcgaccatctcgtccacggttggacgggcctccttcgttcctgaagcgtcggttatcagaccgagcgaacgttccttcggctgcggccctgcgctcagcatcgttagcagcagcgacatgtccggtagacccatccgagtcgtaatcagcgtctgaatcctggtccgagcgttggtcggccgagtattggcgctcatcctcgaagtaatcctcgttcgcctcagcatcacgtcggggggcgtatggagcctcgttgcgtgcaccgaccgagcctccgacgttccattccgccatcacatcggccagcgcgtcaaccaaagtgactcgggactggtacggcgatccatcgcgtcggtcacggcgacggtcgtcttcactgtggtcgttgctgcggtcgctgtcacggcgacgtcgttcgctacggtcttcgtcgtggtagcgttgttcgcggcggtagccaccacgagaatcctcgttcgacctcgcatcgcgtcgacgtccatcatcttgactccgagagcggcggaacgactctcggttcgatttgcggtcacggtgacgcaggatgtcgttgatcatgtcttcgaggtcatggatgctcttgacccggacgtggcacagacggtcttctaagtttcggtcgtcacacgtgaccaagaagtggtccacgtggtccttcgcgtcacgaccaccgtcgttgcgagcgtagccgttgagccggttgaggtagtcacaaacgtgttcattgtcttcccgcttggccgagtagtaccgagccttcgcggactgggaaaacttcgagcaatagtacttgatgaacgcctcgctcagcaacttccacgtgcgtcttgtcttgcgtgggagctggcgacacccgtgcatggctccatccctgagcttaagttcgatcggcatacaccacccgttgggtggtgcatgcgttcccttcatctcatagatgaacgttcggagccactgcatggagtgctcgctcttgtcgcgcgttccgtagaacggcttgatgttggcgagaggcaaatgcgtggcgatctcgagcgttggggttgagctctggttgtcggtcgcccttagctcgcgcacctgacgtgcccattcgctcggtaggtccccttcgtagtagtcgggcccgtggtcgtcgtcgctgtccgacgaatcatcttggaggtcgtaacgtcggccggaccgacgaccggtcgctccgcgcgtgccaggcgtggcgaatgaagcctcgttctccctagccagacgttcactacggtccgtagatcgtggagttaccatgtgcgcgtcttgcatgtacggcgaagcctcgcccttgactgcgaagactccgtcatccgtggctgccttccgaggggtcgctggtagcgggaccttggcggggtcaaccgctcccgggaccgaacgaagcttcgttgagcctcggtctgccaccccaaggcctcacttaacttcttcctccacttggtaagagccttagcgccggtggttggcgtccagctcgcgagagcagcttccgtcgggaggatctgaggttcgcaccccatcgcccgcaggaggtccacagtgttctgagcgacctgccgagtactcgttgagtagatcggtgttgccaaagcccctccgaggtccattcagatggcctggcggacctgcttcggggagaacaactgcatccactcgctcttggtcttcatcagctccaggcatcggcctagaaccttgttggccgccggggtatcgccgttgatgggaggacgagtgccaaccggcttggaggttgcctatcgtcaccgaggctctgaaaccctcggtcgcaccgtcatccgcgtcataggcgggctcggggcccggcatgtcgttgaacgtttcggagaggtcgcgggtgatcgacctcgatcctccactgcggcacgccgacacaaccgcagcttccgaagtctcggacgtcacagtcctgacatcccagtcatcgtcttcatcatcttccttggcgtccgaggaatcaatcgccgtgtcgtagctcaccgagcgctcgtcgatcgactcaatccgatccgtcgctggggtcgagaacgaactcccggagaacatcgaagcctcgttgcgcgttccactcgacttcaccggcgtcgctggtaccgctgacttgactcctttcgccatcttcacacgtcttcttcatctcttctcttctcttcttcttctcctctttgcttgttggggtaagacctacaacaacccagacacaccgaaggtcgcaccaatcccgggtcgcggcaccagttgtggtgtggtaattccactaaaattctcctctaccaaaaggcattagagacaccaacaacacgctaacccgcaaaggtaagcgcttattggatcaaaacctgaagaccaggaccgatcccttacaccgggtcggttgcaagcgcctctgtgcaccttaggttgtcttcggtcaacccaaaaaaacctgtaccactagccacgagcttaggctaggatactatgtagcgctttcgcgcaaccccactacagtccctcagaaaggaagggtaccggcgtgttaggccttaaacagggggaccaaggtaaaacctcggtaggtaggctaatacactcagggacactctaatcccacaaatatatactgaacgatactctaataccgttcctgcctctccggccacgccaactcttggcgctgccaaggaaactctcggtcaatgcacgataagctcatccacacgcagccgagcgtgtccaggcactacaatatgctagctacacttaccaaagtcggacttgacccttgttggctttgggggaagactgtctttttattactgagttttctgaggccctgggggcctcgttctggccatcctatgatgagtcctatgtccctatacaaatatctagtgtgaacgatcgcaataaggcgattccggacacatcaaatgacgaccgcggctacactaataagtgcggccgaagtacgtaactaaatgcatctgtacctaaaagtgggtaccatgaagcctcgttcggggttctattaggacccgacgaggcttcggccactgcctgtcactctaccgaggataatgtcatcatccaatcagatgcagccatctccgtctctcgccttgatcgccccttgattgaacttgattgtcgggctggcgggtcaacggcattggaaactgccactttccaaataccacattccgtcaaacatccttcgcgaacgagtcaatccacatcgcatggacttctctgagaactcacatgatctcacgccataaagcgttttggtttttcggccgcaaacagcctcccgcacgatccgcctcggagcttcgctcttctgcactgcgtgcctctgactgctcgcgagcgccggcgcccgcgcgcacaccctcgacgccttccaggctcccggtgtctgagtacttcgcggcacatcgcctgaagcacagggagaaagtgcatcataaagattgcgaaaaatcaacaagcgagatacccccatccccatccaaaccactatcatctgcatgtgtgtgcacattctgagtgacatgaaactagcacataagcactgtggtttcaggtagcacagcagcacacgcgcttgtcagcatttattatgacaaagtcaggcttgaagcggacctgaaactcgctaaaaatcacacgcttcagaaaccctagacaccaccagatgtcgacgcatctacgctgagatgcgcagtagtaaacaattgataagaatcgaccagcacaatccgagatacccgcaacaaaaaacaggatacttctgcttcaccgcaccatgcgtactatccaaatgaaccaaagcagtgagatcataatcattagccaatacgaaaagaatccacctccgatcctgtccccaacaatggtagcctaatgccgtcctcatcattcgaatcacaaaacacgagcacatacacaggggatcaacttaaaccttcacgatcgtacattgagcgcatacaaatctccatgactggagccatgctgtccggcttgtttacgcacaccacgacttcacattgttttgcaccttctcgagatctggagctgaccctgcgattcggtgcttacaaacctcgcgtgacacaaagcagtatgctaattgagccaccatagatggcatttcctcaagcttagcatttaaatactccttcatagccgtagaaaacttggtgctaaccggagacggtggcgcatcgtcagccattgtatgctcctattgcaaaaataaaatcttaaaatccacgacctggacctctggaattccctggcattcgagggccttgtagcagcaggaacaggcttcaccggacgtctcactgcgcttggatttcagttggtcatccagcaccacatatcatggcgtgttaaagccagcgagccttcatcacggtcgactggttcatcgtacagcgcactagatttttttttggtaaacgttggtaagcccgcctcaaactcttcgtagggggtggcggcccctgtacgccggagctcgagctcgagccaaggacactgctctcgccggccctgtgtactctttgccatggtggtggcaaaaaagcggcggatatcgagatacttagccctatcttatttattattggaatcttattgatatggcattagtgatacgttaatttcagtattgttgtaatccacggctttggtgacaagtgaagtataatataataacagtgcccaccgcctatttttatgtaagcgtactgtatctcgggattggtgcaaactaccctaattattagtgcgtgcttccatcagaaattactccactcccatatgcccggcgttttgtgaggtcctcagggtgggttaagtcgtcactaaacttcgcaagcgattgttagcagagctccaatctgtcgggtctctgctcatggaccacgcgtttgtatctagtgttattagcgattgcaggctcgaaagtattccgcgtcaagctcgatccctgttttttatctttgggctctttcggagtgcacgcggagaagatacatgggcagatttttttctactatcggtcagtgggtcgtgaatcttggaaatgacccagcacccttcgaatgtgctggggttggatttacgggtgattcgtttgtcaaacggcccatggatgtcgtcttcaaaatgaaggggtccggattcacgacgcagaaaatgatagttcatctcaagggaatcctagccggtgtgcctcacgacaaaaccaagctttcacacgcagatacggttttgcaaaatggtttcgcgacttctaagcttcgcgtttactgccacgtggacccgaattgcaagaaggatcctaggtcttattcctctgatacgttggagttcagacagcttgccacgtgaaaacaaacaaccgacatgtctgtttcaaggcggaggatacgtggaatgcgaagaatggccttactcgcttgacggggtcagaacgcagtgtacgagtccagcgaacggagcgtgcagtggagaaaatgcgaaaaaaatcgctccagtaaacgcgtcggtacaaaaagggtaaagaatgagagaattcgtgttctcgagatgatgatgggcgcgagcgcagcctctgcttgttgccctatgatcgctgaacgacgcgtctactccttattagacaaaagccaaggcaaaactcacccctctttttatgccccccccccccctcaagcatatcaccagttaggcacctacatacttgattctttttccttattggcataatgcaacattccagcagagcttgttgagacctcttttagaaacttacggaatcattttgacatgtctcatgagacaagtcaactatggtgatttgtaagaggccctgcagtgcacatcacttcatattggtaggttaaattataacatgatgactactcgatgtacttttatttagtacacatgaacgtacattctatgttgaacctatgtgaaagagcgctgagaacattttttcaggtgagatgcacccatagtgttttgtaaaaagcaaaaaaagtgtctctacagcacaaggtaaccagatcctctctttcctggagcgggaaagagcgggtcgcgcgtacaacgatgtcagcgtgtatggttcggacttgtgagcataaaatgactttaaacgcaacaaaccctctgctccattgacaacaacgactgttaatcatgcagtttattactacgccaggaaggatcgatatctcaacgtaaaagctaccactgtgctttctcactttctagggttgatccattctaccgttgatactgaaagtagaggagctcctcttcagcttcgacgtctgccgtcttgcttctcctctgcgtcttgatccactgtcatagagctaggattgaggatggaagtgatgatatccttaccgatcgatttgcgaagctccacagttgcccacgcggctatgtagttggggatacctcattcttctatcgagtagaacccgcacctcccatgatgaaagtatcgtcatgcgcttgcgatgataaatttgaattggctgactggatctgatgacgtaacccagactgagcgatgttgaaaaccatagcgtagtcgatttaccgcaggcaaccttgaacctgttatgactaatgaactgccacggcaccgccgacaccaactgcggcaccgactctaaccaagcaccaacatagttctaaccgctagcaccacccttgatgatgcacctgattacagtggaaggctctcgaccaggctacgtgacatcatagcagaccacaaggaacgccggttgaacaaggtagctcgagtaaagttgcgattccagcgaggtgcatcttctccgggcagtgtggcggtgaaaatggcgatgaagcttcgcaagaccatgaatggaagttcaagaggtgttttgcggagaagattgcgaatgccatggtggagccgatcgcgagaaagcttcgcaacagaatcaagagcaatcttcagaggcgattctcgcataagaacggctgtgttaagtcgtcactaaacttcgcaagcgattgttagcagagctccaatctgtcgggtctctgctcatggaccacgcgtttgtggtgttgctgcatctagtgttattagcgattgcaggctcgaaagtattccgcgtcaagctcgatccctgttttttatctttgggctctttcggagtgcacgcggagaagatacatgggcagatttttttctactatcggtcagtgggtcgtgaatcttggaaatgacccagcacccttcgaatgtgctggggttggatttacgggtgattcgtttgtcaaacagcccatggatgtcgtcttcaaaatgaaggggtccggcttcacgacgcagaaaatgatagttcatctcaagggaatcctagccggtgtgcctcacgacaaaaccaagctttcacacgcagatacggttttgcaaaatggtttcgcgacttctaagcttcgcgtttactgccacgtggacccgaattgcaagaaggatcctaggtcttattcctctgatacgttggagttcagacagcttgccacgtgaaaacaaacaaccgacatgtctgtttcaaggcggaggatacgtggaatgcgaagaatggccttactcgcttgacggggtcagaacgcagtgtacgagtccagcgaacggagcgtgcagtggagaaaatgcgaaaaaaatcgctccagtaaacgcgtcggtacaaaaagggtaaagaatgagagaattcgtgttctcgagatgatgatgggcgcgagcgcagcctctgcttgctgccctatgatcgctgaacgacgcgtctactccttattagacaaaggccaaggcaaaactcacccctctttttatgtcagaaatccagccctgtttattttcgatacgacatccatgagccgtttgacgaaagactcgcataggcttggtacccttgataagcactaggctatctcacgacaccaacccgcgaaagaacggctgcgtcggcatgacgaacaggaccgttcgccaaacgctgctcgcattatgggggtcggcgaaatacaggtccgtcttgaagctcataacattgtctatcttgtttcgcttcttaatctaaaatttcaaatagaaataacgttaataggcacgatcttagtggtttctgcggccggactcatttcttgtaccagtacaatcatgcaaagccaacatgtccttacatcttccttattttgttgaacgccagcgaattgccattctttgtctgcttagcacaaggcgctcgaaattactcctctactttcagtatcaacggtagaatggatcaaccctagaaagtgagaaagcacagtggtagcttttacgttgagatatcgatccttcctggcgtagtaataaactgcatgattaacagccgttgttgtcaatggagcagagggtttgttgcgtttaaagtcattttatgctcacaagtccgaaccatacacgctgacatcgttgtacgcgcgacccgctctttcccgctccaggaaagagaggatctggttaccttgtgctgtagagacactttttttgctttttacaaaacactatgggtgcatctcacctgaaaaaatgttctcagcgctctttcacataggttcaacatagaatgtacgttcatgtgtactaaataaaagtacatcgagtagtcatatataataataaattcgaagtccgtgagtgtgtcacgctttttagctctttgatttgatttgtatcacatatcaggactaacctaaatttccgaaaataataatccgggcactacttaatagtatcctcccattttgaaacaatatcagatactttatggatattacacagtttttcatgtgtaaatacgctttcgtagtcggagtgctggctgacgacgtggctaatgaggttcgtatagctacgtttggcatcttgcttgcgctggacaccgcaccggaaccggtagtagcccacgacaaaatcataaaatacatacttgatatttgtattgatgtaaccatgtaaccctggaaggcacctatggttacgttttagagggtactatacgggtaagcggtattattcaggaattcccgttagttagtcatttttggccgccccaaattatgttttcggctggctccgccgatgtacatgtcgcatcgtgattttacgagaaaaagtagatatagagtggaagtatggcattcctggccagttcgtaataatttcacgtgtttcgacttgtgctctggatttgcatgcagtcagcgcttttagttatccggttagttagaagttaggttaatgttctctggattttatccagagtccatgggccactgaggtgccattattctgacatcaaatacctggtcaatatgattttgatttgggctcacatatgcagttgaagtgcctgctttactaaactagggcgccggggatagctggattttggtataaacctcctctttatttttattaattacttttcatattagctaccgtcatctcctgcgcctgcttcgcagccgcagcatctgcccggaaattggtcttaaaactgtagatgccagatatcaaccgggaatgctttacaaaattaaaaatgcgaaccttggctgagatctgtttgctgcttgaagaaaatttcgacttgaaaatgcaaatacttatctctagtgctattacagtccgcttcaagcgttctctctacttcgattcgtctctccgtaccttgctcaatatatgtactgattcataccagtatcgtcggtagtacaccggttcagtctgctcacgcatatacttaagtaaaccttttggaggacccagtgcggcaccagaatcgtaccggtttcaagaaaatgtaccggttagatgataagacgggtcatcgtttgacttgatgtaccacggatataatcctatttggtctgcgatagcagcactaacattgcttcctatcccagtataaccggttacctaatcaatttatgctgctatgctgacccatccggttgagattaagacaaattacctattatatttgatactccctaatcaagtatatatacctgcgacatctaatttgtctgccactcaagcaacatccgttggatttttttcgctcggtcaacatgctgacgggatcccgccttgaaggcgatgatttcgacatcgcttcagactaagtgtagttgatcgaggatttacagacagaacaccagcgtgggcgctggaacgcccaaagccaccaacttttactatgatagtggagtttatgctcttctgtgtgaatctaatattgagctctcctctgagccttgcctgccatgtattgggcagtccaggaagactggggagccagtgaagcttgagaactagggtaagggccatagggccgaaacccactacattgtccccaaagcttcacatggcgacgttgtggctcgcaagtcgccttgtcgctcgcgcgtttggtcgccttgctcctcgatcagcgaagcagcgtactcccagtgtcggctcgccgctctccgggagctgcgcggcgaaaacgtgatggaggtgctggtcgcggcgctccataatctgataatggtgatcaagccctctttctgcgagctaaaaccgcaagcgtgcgaagacaagagtcgcagaggctggacagtctccaagtggcggtcaatgacgttctcgccgttcaaatcattctcgtaaggaccgtggtcagcacgactagctttcttgcggagaaatgcagtcgctgtcggtgaccgagacgacatgagcggtgatacaagcttcgggggcagtgtagtgaattataggtccagcttgatgtcaccgcagcattacccaacctacgatcacccaagtgagtcagcagcattgactgatgacaatggatgatctcttcgaatgattactctcgacgctgaggtgtcttacggcgtaaacaggtcgagcagttgcgtggctcgctggactgaagtgtccagtcaagctacacgaggatttagtaggctcaagtacaagtttattctgtgtatccacttcttcgagcagcagctgccttctagacgcttctagaagctagattctctcgttagaagactggtgagaccacgggctattatcatcagacccagtgcctcacccacttcatcaaccccctctccaagcgcaaagacccaagttcctcacaataaccaggctgttggacctggttattgtcggagtgcgcgggcctccaattagatctcgcatccgcttcacgcacgtcctagctgccatggacccgaagctgatgttcaagctggtcgtcgagaaggcgaacgaacacgagcggcagctcatccgcctcaagcagaagaagccagagcccgctgaacgagaccaagacaagtcaaagaaaacccagccagccaagccgaagaaagactggaactacaaccacctcgcaaagcagactgaggctgttagcgctaaagcgagatctaattggaggcccgcgcactccgacaataaccaggtccaacagcctggttattgtgaggaacttgggtctttgcgcttggagagggggttgatgaagtgggtgaggcactgggtctgatgataatagcccgtggtctcgccagtcttctaacgagagaatctagcttctagaagcgtctagaaggcagctgctgctcgaagaagtggatacacagaataaacttgtacttgagcctactaaatcctcgtgtagcttgactggacacttcagtccagcgagccacgcaactgctcgacctgtttacgccgtaagacacctcagcgtcgagagtaatcattcgaagagatcatccattgtcatcagtcaatgctgctgactcacttgggtgatcgtaggttgggtaatgctgcggtgacatcaagctggacctataattcactacactgcccccgaagcttgtatcaccgctcatgtcgtctcggtcaccgacagcgactgcatttctccgcaagaaagctagtcgtgctgaccacggtccttacgagaatgatttgaacggcgagaacgtcattgaccgccacttggagactgtccagcctctgcgactcttgtcttcgcacgcttgcggttttagctcgcagaaagagggcttgatcaccattatcagattatggagcgccgcgaccagcacctccatcacgttttcgccgcgcagctcccggagagcggcgagccgacactgggagtacgctgcttcgctgatcgaggagcaaggcgaccaaacgcgcgagcgacaaggcgacttgcgagccacaacgtcgccatgtgaagctttggggacaatgtagtgggtttcggccctatggcccttaccctagttctcaagcttcactggctccccagtcttcctggactgcccaatacatggcaggcaaggctcagaggagagctcaatattagattcacacagaagagcataaactccactatcatagtaaaagttggtggctttgggcgttccagcgcccacgctggtgttctgtctgtaaatcctcgatcaactacacttagtctgaagcgatgtcgaaatcatcgccttcaaggcgggatcccgtcagcatgttgaccgagcgaaaaaaatccaacggatgttgcttgagtggcagacaaattagatgtcgcaggtatatatacttgattagggagtatcaaatataataggtaatttgtcttaatctcaaccggatgggtcagcatagcagcataaattgattaggtaaccggttatactgggataggaagcaatgttagtgctgctatcgcagaccaaataggattatatccgtggtacatcaagtcaaacgatgacccgtcttatcatctaaccggtacattttcttgaaaccggtacgattctggtgccgcactgggtcctccaaaaggtttacttaagtatatgcgtgagcagactgaaccggtgtactaccgacgatactggtatgaatcagtacatatattgagcaaggtacggagagacgaatcgaagtagagagaacgcttgaagcggactgtaatagcactagagataagtatttgcattttcaagtcgaaattttcttcaagcagcaaacagatctcagccaaggttcgcatttttaattttgtaaagcattcccggttgatatctggcatctacagttttaagaccaatttccgggcagatgctgcggctgcgaagcaggcgcaggagatgacggtagctaatatgaaaagtaattaataaaaataaagaggaggtttataccaaaatccagctatccccggcgccctagtttagtaaagcaggcacttcaactgcatatgtgagcccaaatcaaaatcatattgaccaggtatttgatgtcagaataatggcacctcagtggcccatggactctggataaaatccagagaacattaacctaacttctaactaacttactaagacccattttgttatcagcctcactttgccggcctccgctaccgaggtccgaatttacccgatttgggctgcctagcagcatgaccaataggtcactgtcatcccagtataataccagcgcaagtttacaatgtaagatatggttctcgtatacttaccggtgactacaagacaaaacgatgaacacgtgtgttcgctttgtacccttatgtatttgatgaagccggtttctgtagtttttgtcatctttggcggtaaggccccttgcgatgagtccgttttcactattgtggcggacatttcactcaaatgcatgcacctgaacgaggtacggtaccctgccaccgaatcgttcggtctaaacagaccccaaatgtaactttcgaagctagacgaaatttcatttaactgtaaggctgcaaaactatcatttctacttggtcaccgcgattaaagcatgattacggtaaatgacactttgttcgaccttaagccgtttagcaaccgcattggtgcactgctgtcacttcagcggtgcagattataatccagtcttgaaggtgagagtgttggaatcttggttgtgatggagagagctcaaataatttggtcaatacaggatactgcgatatcatctgtattaacactttggtgcaggttgacattcaatacagttaggttgtcgttctgctggctaccttgcattcggtgcggctaactttgtgtaaaacttgatcaatccattttgggccacggaggggtctcgatcgagtgcattccgaaatcatggctggggctgagcgcgcggtcctggtgcttgcggtgtctcttcctcgcgtacagcgccaccccagcaatgccgacgactgccacgacgcaggcgatgactactaacagcaccccctccgtcccagtagaggagctcgtactctgagagctggcaagagacactgcctcggtgctatcctccgcactgtacgacgttgcttcactcgtacctgcggcggcagtttgcgcaacctgctgggcttgtccgtacggtccttgctggccttggttgtacagaggcctcgtcgttgttggcgttggcgtcttcggcttcctagtcgtcggcgttggcgtcggcgtctttggctttttcgtagtaggggttggcgtgggcggctttggctgtttgcgcaacctgctgggcttgtccgtacggtccttgctggccttggttgtacagaggcctcgtcgttgttggcgttggcgtcttcggcttcctagtcgtcggcgttggcgtcggcgtctttggctttttcgtagtaggggttggcgtgggcggctttggcttttttgtggtaggtgtcggcgtgggtggtttcggcttctttgttgttggtgcgggggtcggctcgggagtgacgggctccgcggtcgtaggctgcggcgtcacgggctcagggctcgtaggctgcggcgtcacgggctcagccgtggtcggctcgggcgtgacgggctcaggagtcgtaggctgcggcgtcacgggctcagccgtggtcggctcgggcgtgacgggctccgcggtcgtaggctgcggcgtcacaggctcagccgtggtcggctcgggcgtgacgggctccgcggtcgtaggctgcggcgtcacgggctcagccgtggtcggctcgggcgtgacgggctcagccgtggtcgggtcgggcgtgacgggctcaggagtcgtaggctgcggcgtcacgggctcagccgtggtcggctcgggcgtgacgggctccgcggtcgtaggctgcggcgtcacagggtcagccgtggtcggctcgggcgtgacgggctcagaagtcgtaggctgcggcgtcacgggctcagccgtggtcggctcgggcgtgacgggctccgcggtcgtaggctgcggcgtcacaggctcagccgtggtcgggtcgggcgtcacgggctccgcagtcgtaggctgcggcgtcacaggctcagccgtggtcggctcgggcgtgacgggctccgcggtcgtaggctgcggcgtcacgggctcagccgtggtcggctcgggcgtgacgggctcagccgtggtcgggtcgggcgtgacgggctcaggagtcgtaggctgcggcgtcacgggctcagccgtggtcggctcgggcgtgacgggctccgcggtcgtaggctgcggcgtcacagggtcagccgtggtcggctcgggcgtgacgggctccgcggtcgtaggctgcggcgtcacaggctcaggagtcgtaggctgcggcgtcacgggctcagccgtggtcggctcgggcgtgacgggctcagccgtggtcggctcgggcgtgacgggctccgcggtcgtaggctgcggcgtcacaggctcagccgtggtcggctcgggcgtgacgggctcagccgtcgtcggctcgggcgtgacgggctccgcggtcgtaggctgcggcgtcacgggctcagctgtggtcggctcgggcgtgacgggctcagccgtggtcgggtcgggcgtgacgggctcagccgtcgtcggctcgggcgtgacgggctccgcggtcgtaggctgcggcgtcacgggctcagctgtggtcggctcgggcgtgacgggctccgcggtcgtaggctgcggcgtcacgggctcagccgtggtcggctcgggcgtgacgggctccgcggtcgtaggctgcggcgtcacaggctcagccgtggtcggctcgggcgtgacgggctcaggagtcgtaggctgcggcgtcacgggctcagccgtggtcggctcgggcgtgacgggctcagccgtggtcgggtcgggcgtcacgggctccgcagtcgtaggctgcggcgtcacgggctcagccgtggtcggctcgggcgtgacgggctccgcggtcgtaggctgcggcgtcacaggctcagccgtggtcggctcgggcgtgacgggctccgcggtcgtaggctgcggcgtcacgggctcagccgtggtcggctcgggcgtgacgggctcagccgtggtcgggtcgggcgtgacgggctcaggagtcgtaggctgcggcgtcacgggctcagctgtggtcggctcgggcgtgacgggctccgcggtcgtaggctgcggcgtcacgggctcagccgtggtcggctcgggcgtgacgggctcagccgtggtcgggtcgggcgtgacgggctcaggagtcgtaggctgcggcgtcacgggctcagccgtggtcggctcgggcgtgacgggctccgcggtcgtaggctgcggcgtcacaggctcagccgtggtcggctcgggcgtgacgggctcaggagtcgtaggctgcggcgtcacgggctcagccgtggtcggctcgggcgtgacgggctcagccgtggtcgggtcgggcgtcacgggctccgcagtcgtaggctgcggcgtcacgggctcagccgtggtcggctcgggcgtgacgggctccgcggtcgtaggctgcggcgtcacaggctcagccgtggtcggctcgggcgtgacgggctccgcggtcgtaggctgcggcgtcacgggctcagccgtggtcggctcgggcgtgacgggctcagccgtggtcgggtcgggcgtgacgggctcaggagtcgtaggctgcggcgtcacgggctcagccgtggtcggctcgggcgtgacgggctccgcggtcgtaggctgcggcgtcacgggctcagccgtggtcggctcgggcgtgacgggctccgcggtcgtaggctgcggcgtcacaggctcagccgtggtcggctcgggcgtgacgggctcaggagtcgtaggctgcggcgtcacaggctcagccgtggtcggctcgggcgtgacgggctcaggagtcgtaggctgcggcgtcacgggctcagccgtggtcggctcgggcgtgacgggctcagccgtggtcgggtcgggcgtcacgggctccgcagtcgtaggctgcggcgtcacgggctcagccgtggtcggctcgggcgtgacgggctccgcggtcgtaggctgcggcgtcacaggctcagccgtggtcggctcgggcgtgacgggctccgcggtcgtaggctgcggcgtcacgggctcagccgtggtcggctcgggcgtgacgggctcagccgtggtcgggtcgggcgtgacgggctcaggagtcgtaggctgcggcgtcacgggctcagctgtggtcggctcgggcgtgacgggctccgcggtcgtaggctgcggcgtcacgggctcagccgtggtcggctcgggcgtgacgggctcagccgtggtcgggtcgggcgtgacgggctcaggagtcgtaggctgcggcgtcacgggctcagccgtggtcggctcgggcgtgacgggctccgcggtcgtaggctgcggcgtcacaggctcagccgtggtcggctcgggcgtgacgggctcaggagtcgtaggctgcggcgtcacgggctcagccgtggtcggctcgggcgtgacgggctcagccgtggtcgggtcgggcgtcacgggctccgcagtcgtaggctgcggcgtcacgggctcagccgtggtcggctcgggcgtgacgggctccgcggtcgtaggctgcggcgtcacaggctcagccgtggtcggctcgggcgtgacgggctccgcggtcgtaggctgcggcgtcacgggctcagccgtggtcggctcgggcgtgacgggctcagccgtggtcgggtcgggcgtgacgggctcaggagtcgtaggctgcggcgtcacgggctcagccgtggtcggctcgggcgtgacgggctccgcggtcgtaggctgcggcgtcacgggctcagccgtggtcggctcgggcgtgacgggctccgcggtcgtaggctgcggcgtcacaggctcagccgtggtcggctcgggcgtgacgggctcaggagtcgtaggctgcggcgtcacgggctcagccgtggtcggctcgggcgtgacgggctcagccgtggtcgggtcgggcgtcacgggctccgcagtcgtaggctgcggcgtgacgggctcagccgtggtcgggtcgggcgtgacgggctcagaagtcgtaggctgcggcgtcacgggctcagccgtggtcggctcgggcgtgacgggctccgcggtcgtaggctgcggcgtcacaggctcagccgtggtcggctcgggcgtgacgggctccgcggtcgtaggctgcggcgtcacgggctccgcagtcgtaggctgcggcgtgacgggctcagccgtggtcgggtcgggcgtgacgggctcagaagtcgtaggctgcggcgtcacgggctcagccgtggtcggctcgggcgtgacgggctccgcggtcgtaggctgcggcgtcacaggctcagccgtggtcggctcgggcgtgacgggctccgcggtcgtaggctgcggcgtcacgggctcagccgtggtcggctcgggcgtgacgggctcagccgtggtcgggtcgggcgtgacgggctcagaagtcgtaggctgcggcgtcacgggctcagccgtggtcggctcgggcgtcacgggctcaggagtagtaggctcgggcgtggttgtagctggcgtcgtcgtggaaggcatcgtcgtggaaggcgtggtcgtggaaggcgtcgtcgtggaaggcgtcgtcgtggaaggcgttgtcgtagctggcgtggttgtagatggcgtcgtcgtagctggcgtggttgtagctggcgtcgtcggggaaggcgtcgtcgtggaaggcgtcgtcgtggaaggcgttgtcgtagctggcgtcgttgtagctggcgtcgtcgtagctggcgtggttgtagcaggcgtcgtcgtggaaggcgtcgtcgtagttggcgtggttgtagctggcgtggttgtagctggcgtcgtcgtagccggcgtggttgtagctggcgtcgtcgttgaaggcgactccgtcaccggcgactcagttaccggggtctcagtcgtcggtgattcggtcactggggaatccgtcgtaggggcttccgtcgtcggagtctccgttgcaggtgacagtgtcaccggagacccggtcgccggactctctgttgccggcgattcggtcacctccggggattcggtagccggattctcggtcgtgggggcttccgttgagggagactgcgttgtcgcggggggctgtgtagcaggagacgctgttgtcggtgactcggtctgcggtgcattggttgtcggcgcctccgtcgtggccggcacctctccgcaatcgtacagctccgtcagcgtcgtggtctgcgagaaccagctctcgtcatagtcctcgttgccgtcgaacgcggagctcgtgtcgatgctctccacgacgtcgtcctctccgtcgtactcccatgtcgggcaggtattgtcgtcctcctccgtcggcacggtagctgccggggtcgctgccggcgtgccgctgccgctgtcaccgcagccaatagacggcaacacacaaccccaggtggatcctgtgacgatccggcactcggcgtcctcgggcgccacgcaggaggacccttctacgaaggacgggaggtagtcgtggcagtcggccaccgctacgtcgccccgcagggggcaggccgtgccctccggcgcggcgcccgcgccagagcacagtgcgccgcgggcctccgacagcgagtaggtggcatcgccgcacacgctcacgtccgcagcggtggcgcatgctgcgcccagcgccgcgaggctgagcacgagcgcgagtcgcatgccgccggatttcgaggattccgcggccgagtggcagctacgcgtctgaaagggaagtggtggcgtcgaagcgactggcacgcttccatcacgacgaacatgtgggcatcgtttactgtgactgcaaaaaagggagatgagcgctcgaacggccagctgacctgagaccttatactgctgagtcgggccttgaaacgtggaagtacgggcttaggcttttgagacttgatatcgtgtcgttatagatatcaaggtattgcaccattttagacaggtatgtagaggcgactacgttatgcgcataatgcggtaaactttgcagcgacatagcggggtcgaagcggagctccatgctggcccaggaagatcgcgaccattttcggggcttgccgagtgacccgaccgctaattacgtggttgcaccgggaagctgccgcgcttgttgacccaacaatgttgggtcggtatcgggcagccatggccacggaaatctggcaattgcacgggccgtgctcggcacgggtgtgatatctgagtttctgtcggcatgatcagtccgatcagtcagtcaattgacggggcacttgacaggcatgacagggaggtgtctatgggtacagtctagcaatactgccacgctggaccacggcaagatccagccaagttgagcaggaactcgtctctgatcggatgcatcggttcggaggcgctggacgggaagcgttgggacaaatgccccccagctggacgccttggccacaaggtgagactgtccttttgatgaaatgactggccccgccgcgacaacgaaatggtcacttgccgacccggcagtaatgagaccaatggctaaagtagccttcaacgaatgatgaaagataagccattcgtgatgcccccccccccacacacacactcttgaatgcaacttcaactcgagttgtgggggtccaccttgtccttcaatgaaggacctccttcatgcatcgcgtgtgaatctgtcaccgtgcgtgttatgctgctcatcagtagtgggcgcacatttgtggtgcggcagcttctcgattcatatcgacagtctcttacttgaacacaggtgtgccaattccgctttcaaccctcgaagctttccagcctggaatacaggaaggcgattgtaggctataaattgaagcaaaagactcggggcgtccaagctggtctcaacgattcgagatgttggtacgtgtccaggaccaaatcttgagcccgtagtgaaggccgtccctttcatccgtccgcgttttcattattgcgtgcgtgccgaactcgggatatcgtacgtatcgtcttcgcttacgacgccaccgacaactgcaacaagactacacaatccgcacctcttccttccgattgaattggtagtgcttcgggactggcgaggaagtccccgctacaccgtgtaattctaggtaagtacttattgtacttcgaagtacacccgaatggtgctgcaaggcaatttgtttcgcttggtgtcaatagtaatgcagaacaatcaaacagttccgggtcaagatatgcaaagtggttttctatcatggaccaaacgtagcggatgtgtattgtatatacgataaaggactcttgtctgaactcttagttgaacggcttcttacaggtaccagctcaaatgccccaacgcatgagcaagatgagccggtgggtgctccgacttccgcttactcaggaatatcgttcaagatggacgagatggagccgcgcctaccgttgcggtgggtagtggtcgacggtcttacgcatgcgaccccagcgcccgtatctcgtccccgtccgtatcgtcgatccccacgcaaacgtctctcaggcacgctttggctgcgcaggcggctcatggacggcagctcctcgtggcgagggatcttaatgggaggcggttggtgtgcgtgcagcccgaatgacggcttgcgcttctttgaccgagagctctgcttcgcgccagacacctcgtcctctgggtcttttgcagcttcggtcttggcagcggccttggatttcttggacctcgtctttctggtggtggtggtagtggtagtagtggtggcccgaacttcgtttgaagcggcgtcaacaacgtcgtcagcagaatcgttatccttggcgtcttttttgccatggtcactgatcttgtcattgtcggacggtatctcggccggccccaccatcgtatcggtgatctgagcaatggggaactcgtccctgacgccgttgagcatcagcggctccatcttgatggggatcttggtgtccgtctgagccttgcgactcttctcgttcgggttctggatcacagccgatagctcctcacgcaaaccggcaatctgcgcttggaagcgcttgcgctcagctccagctgcgttccccactagaacttggagcgacgtgatgcggtttaccagactgcgaatgcgtcggtgcggccaccgcacgagtccattgcggcggcagatcttcttcatcagagtaatgcatactcccaattccttggccaccaccgccatcggcttattgaagtgcggacgcagctcattgagcgtcagctccttcacgttcacaacacccccggtgtgcggcatcggcggcatcatgtgctgcttcaccaggctcgtcggactaccgctcggcgccaggtacagactcggatctcccgagatcataaggtcactgagactcactgctgtgggcgtcgtggggtagccaccagcgccgtttggggactgctgcatcatcatctgatgaggacttatcgccatgggcgctcccgacatgtacagcgacgacagtccggcgccgtggatgggggacatttgcagggggaggccgtgctccagttgttgctccagttgctgttgttgctgctgcaagtggaggtgctgctgatgctgcgcttggagctgcatgtacggcgtcacgagccccgtcgcgccgccgcccagagggtccagctggctcgtcggctgcgtcagcagcgcgtacatgttctgcggggcttcgtaggaccaggcgtccgagatgaaccgtgagtcgaactgcaggtccttcatgacggtgggcgacacgggcgagaccgagtcgcagctcatgttgggcatgggcaggccgtcgctgggcttgggcagcccggcgtcctcgaggcccgcgccgaggctgctggtctgcaccacggtgggcgccgtctccaccttgaggctggagccgccgggcgtcgtgggcttggtccgcagcggctgcatactcgggtccggccacggtctcgagacgtccacgggcgcgggcttgctctcctccggggccttggacgccgactcgacgcgcgggctgctctcgggctcgggcacctccagctcgggcgcgcgctgctgctgcatctgggccgccatggggcttctggtctctgtctacctcctcgcacgtagcagtggacgcgatgaatggcgcatttccatcgctagcctgcgccgcaataggagagaagaggagaaaatagaaggaaatctttttccggccgatgtcggtggcagcagtccgattgtggttgctatccccgaaagcgaactcgcccctttcatttgacttggtgtttgtactgcgcattgcatagatgcgccggtcgggtccgtgtacaaacaaggtcacagactgcacacaggttgaacctgcgacccttcagggcacgcaagctgattggccgacgacggtccagagatcttttcaaagatcgcggcggccagatggcttcacccgctcgcatcgcctcgaggcacgcttggctatggcggcgtgcacgaccgccatagcgctattataccgtgcctgcaaagctgcgcgccgcacgctgcacgcagacgccgccgttcgtctgcagtctcggggcgcgttcatagatcgtgcgcggcggggctgtccttcaaagatatatggcttcaagccgacgacgactagctagagcgcgctccatggcgactggagctctgaaacgctcggctctcttggtgaacggcgcagtggcgaatgccgcatcggataagtgcgtacagtccgcctgtactctgctgccattgcgagcgctacagctttcgtcgtaggtcaatcgtgtctgaaccagctcgtaggtggaggaggaccaccagaactgtggagaagctcggattcgagttggccgtgggcacagcaggcgcagtctccgcttctgcggttcacgatggtccgctggaagcagctgtggccgcacaatatggcgtcacgtgccagacatggactccatggtcgagggctggattttggtccgctcccgtcctcgggcctgggcgccccgagttccgcgcgctacgtgggaacagagtatcgacaagcggggcgtggatattggccggcatcagttcagcggtctgcttcttgcaagcccaagggttcgtggccacgggatcccctggccaaagtttcaaatgctgctgctcagctgagggcggaccgactcggtccgccgtgcagttgacctgcatctgcaaggctgtgctccgaacgtgctcggcgctgccatgtttgtcctcggcgcgggggcacgccggggcatttgacccattagtttgcaacggccgcttgagaaaatcggccatgcgatggctacgaactcccgagaccggatggcggtgtcgtctacagagcggtctccaagtgtccacagtggcacgctggttcagtggagccatccacgtcaatgtggactcggagcaacggagatctcagcgagtgccgggctccgcaacgcggtagatgcaacaacttgtagcaggagaccaaagtgggaacgttcttgactttgtggggaagttatacactgcgacacgctcgccgcgagcaagctcgctcaaatcacctctggcgacagttcagcaccaatggtgtgcactgcgcggctcgctccgggcggagccgcggccttcccccttcgcccacggccgagtcgcgcgtggcgcttggcggccaagctctcgactcgaggcggcgcttccttccagaaaactttgatgtcgtggctgggcaggagctccaacttcggagctcggagcgagctgcacttgtcgtagcagaaacgagtcgccacctgctcgctctatgccgatgtacatacatctgattgaccccgtccccgccggcgcggcagttggggctcggctcggagcggtagccactgactccttgccggccctcaactcaattgccaacctgctccgtgcaccacacggaggcccatgccatgcccagcggcgtcagtgcaggcagctcctccttgccctcgtccttctcgtccagcgagcacaagagcgactcgagctccgtcaacagccaagtgctgctgccgcaaccgtcgagcgcaatcccgccggcgacagccgaccaagtgatcgagctctccgtgtcgtccgaggagctcgcgaactggagacgcagacaccagcaagctcaagcggaacccatgccatggcccggtcgcacgcgcagcgtcttgcgtcggtactcgccgttggtcccacctgcggcgttgctcatcgcgttggtggtgctgctggtgcaagacctcgcgaacgctgactcatcggatttgcctcgtgatagctccaccgtaacggtgatgcactggagcacgtgcgagctggacaacgtcgtcgccaatgcctacaacctatcggcgcagtgcgcaacagtgacgctgccgctgtgctacgagggcgtctgcgagactgaagacagcaacgccaacatcagcgtgtccttcaagcggattcctgctatcggagctagcgccaccagcgttagcgcgcaaaccgtttggtatctcgctgatcgaccggacctgcaaacccgcgaagaggccgagttgcagatgacgctcctgtacgaggagctccgcggcgaggtggacatttacacgctgtacttacggggaacagggaacagcactgcgttgagttgcaacgcatcggatggattgccgttgcagtcggccatttttgcgaggaatggcggcgtcttggattccagcgacgtccaggactgcgtcagtcggctacaagaactagggtacacagttctcggcgcgttttcgcttgcctgtgcttctcgagatgtcgaggagatcatcacccagtttcagcccgatgcagaagccgtggtctacgctcttggttatggcacacttgtagcccagcagctcatgcaacgtggagtctcgcagatcgttggctacgctgtagacggagcactaggaacatccgcagcaacttcgccatcttaccaagtgtccagaagtgatgaagcctttggagaggtggccgccgatttcatcacatggtgtcaatctgacgcaaattgctccagtatgttttccgacgtaagcgctaccacgacgctcgacaccacacttgtagaggtgtatactcgccttgacgctgatcccgcctccctgtgctccagagttctactggatgcggatacaagtggaaacacaaactccgctacgaacagcacgacgccgccatctttactgctgcgccaattgctcggactgatgatggaaagcacgactctatggccgtttataccagtaatggcataccgcttccaccggtgcggatctgaagacctcgcagtgcttacggagtttgtaaacaacacatttgagaccgacgacggcaacgaagacacaccagatctgctatatgccatccaggctttcagcgagctgtgggaagcaccgtcaccgaaccagggagagctcacggagcggttcgctggcgcaacgatcagttccggtcgggtgtatacgcaattgcaggcctactgcttattcaccggtgataattcatccgatgcctgctcaaacgccttagcttcagcgtcgaattcctcggtggtcggagacacgctctcgtacacgacgactaacttgacgaacgccagcgcaaccgcgatttcccccgactcaagtgtacttatactcagcggagggcttgacgtgatttcacctcccaagtacgcaactgcggtttttgatgcgcttcagacagatagcaaggccctgcttgtggtccccaatggcacgcatgacgtgatccagacggccctgctatcgaacggcactgcatgcgcccgccgcgtattggcatcctacgtgcggagttcgggtaacttaagcgcatacgatgcgtcttgcatggccgacctgcccgtgtcgagcctggcgatctccaacacgtcgagtctgctggtgctcggcgtggaggacgcgtacgatggcgttctcgtggccacaaacagcagcagcagtagtaccagtggcggaagcaacggcagcagcggaagtttggaaagtgccggatcctcgggctcagctcttgatgagctaaaccgacgtatctcggcgctggaaagctcccgagatcgctacaagatgacgcttatcgtggtggcgagtgtgctgggggctttgatcatcggcagtgcggttactatgatttgccggcgtcaccgcaagcaacagctcgccagtgaggaggccatgctgagacgtatgcgtggcgacgaggaggacgaggtggagctgatgcgcagtatttacctgctctccagctcccccagcagcggcagacggacggaggccgcgctaccacaatgaggtacgacccggacgcggactcttgactgtacgaaggtactagtatttaacatagagatagagactggaacagtagtttagccttagtagtgtacaatatgcaatacatttgcgaggaaggtttttgccagttgcaggttagccgcttggtcatggaccctgcaaatctactcaacacgcacgattacgcactaaaacttcagaattgaagtgcgctaattgaggcccttgttcaggtgccagtacacgttcttagtgtttcccgggctagggtttctagtttggaccaagcattttcaggacgtgtgctacggcttgtccaagtgggtcgtctcctggactaacgccgcaatagcgagattcgggcaccttggagatggtaatccaccgctcccgcagcacacgtaccgtatttcgcatgtagaaagctgcacatgatgttcacaacagaaaacatacctttaaaaaacgatgtgcatcaaaatatgtattgtagaagaaagctacaccacagcttcgtcaagaatgacattgcggtcgaagtcttgagtttggtcgaccgccttggccactggccctactagcgataggttctgcagctctgccaccagcgacgcggcggcgaggcactcctcgttgaggtgtaagtcgcatttcttgtatccattcgcgatggtgtcggagctcaggctctcccaactagcgcgaatccaatggcacatcccggcgcggcctggtggagtcagcttaaacttggcttccgcgtcgcgcggctgcatcagttgccgctggatgtcctcgagccaaaacctgcgcagccaagtcttgaacggatgattccatgctacgtctgcaggctggcaaatagacgtagcatggggaggcaccttcagcagcaccaccctgatagatgcagcgtagaccagcacttcagcggtccagtggccgctgaagtcatcccagaggagcagcacgggctctgcatgcgacgtgcggtgaccaacgtgaaaatgtaggaaccttagcgaaagatcactgttccaccagcctaaaaagaaaaacaataataatacaagaaaatgagataaatccttttgagcaagtaaaaaaaagaatggtagttatcaaagtgcatctcatatgccggtgcagctttctacatgcgaatacggtatcctgccaagcattgattggccagggcagaaggaaatcgcctcgtccttgctcattgattcctagcacaaatgtgccagcgctggaacaccagattttagtgttctgaaaagtggtgttcttggaacaaaagggtacattgtaccggtttttgttagccaatcaaatgcctcagcaattggagcttagtacatgtgccagcacttgaaccagggcctgaaggtccaggatacagttcggcgcattgtgcccggtgtcggtcgggcaagacgcacgcacgtgccggcaatacccgactcggcatgctgtctgcctgcttcgctgacagcactttcgagttgggcgtccgccaaacgcgtggcgatgattgagattactggaggtacagtagaaggatctttactgcgggttgagttgaatggcgcaactctaatcgtgtgcacggatactctccctctccgattgcatgatgcaaggcctgcatgcatcagcgccgtcgagcgatgttccatgtgctgcattcagctcgaggactggaattgggtcgctgcatcaccagaaaaacacgccgaccagagatcatccccgtcgcgttactgcagggatcgacaagccatccccacagatcggcagcgcgaataactgcacatgaaactcatcaaaatgcgaacatgagtctcaaagtcgcgttggtggcggagggcagcaacggcggcttgcccgcgagcgagccgcggggaaatgttcggtgatccccgacgttgacggtctcctttggcacatctggcgcgggaacacacttggctttcgtatggagcgttccctcctggctgttttacaggggcccatagactggcagtctgccaccgcccccatcacaatggtgggcacgcccgggagggagcgagcatgctgctcacactgagcgagctcttcaggctgaagtccgaaccatcaactgccgcttgtcgaggctaggcccagcgcgttctgtgagtgcagtgaggctccatgctggcagtgatcccgctggaaaatcgcaaaactgaagccatgtatggtacgcgcatacacctgtcatatccgatatgagaatgggtactgtagccatgtcgaaaaagtgcagggcttgactccctttacttttttccggtgtaggcgcgcgagcctcgactagggctacaaccgacagctgcaacacgtagtgggtgcattttaccgctcaatggttaagctccttgatactgttcctttaagaagttaaacgggaattctgcctaatagtttctcttcgttttatcagctccgaaactaagcggaagtacaattcgatgcaaccaaagacttgtcgtccaccactcacgacttccgcgagtattacttgcatatgttaagttaatataccagtgaaagtgatcccctttcggcgcagactggcgcgtagcggagatcttagctgttcagttaacatgaggccttaaaattaaaccaaaaactgcgcagtttattgagacccgatggatagcggagactttggccaagcagctcagttcggcggcaaaatgccgtgcacctggtaaggcctaacgcaccggaaacgcgctgtccccagctcaagtcaaaaggcaaaaaccggctggcagatttagggtctcaatttttgggtcgtgcgcctggccgtgtgcgcccctttctccgcttgatacagatcgcctcggcgaattactttgcctccccaatcacttcagaaactacgaggagagcagcaagcgccggcttccgtgagcccatcgccgcgccgacccctgcatcctcctcctgctccttctcctcctcgctccctcccatccgcccttccgcccaccatgatggcctggccggaagagccgcagccgcgcaacggcaacggcggcggcgactggcccgacgccgagctgctcgagtccgccaacttctacccggtggacggcggcgacgagcgcgcgcagcacggcgccaacaacttcctgagcgctgcccagggccaaggcgttccgcaggccggactcacgtactcggcgtcctgtccgtccttctcggggctggacgacgccgacgacctcatgggcggcgcgaacgccggcaacgggctcatgtccttccccttcggctcgcaggagccgctcatggatgccatggggcccgtggaagacgcgccgttccccggggacaagagcttcgacatgctgctgcagttccaacaggactaccaggacgcgtcgcagcgccagttcccgcaccagcaagtgatggggccgcccatggacatggtgcagcagcagccgcagcccatggccggaggacgacgcggattccacggctcccagtcgttcaccagcttgtccagtatggagtccgagtacaaccgcatgaacggtgcgtgtacatctactgtgcactgagatgcaatgccactgttgatgcagagctaataattttgtatttgtggtggatgcagccaatagtaagcggaagaagggctccgagcgctggatgaagctgcaacgccacaagtcgtttgactccaccacgcccatttccgagcctttcaacttcgacccgaatgcgacctttggtgccgctgctttgagctcgtcgaaccccacacctgaccagcttctgcaagagtgcgctcaagtgataaactatattctaggtgatgttgccgctttactaacgctgttattatgcttgcagaccgcccgacagcgacatgatcggattctctatcgacgaattctcaatgccatccgatgacccgaactggcccccggtcgcttacggctcggcgccgagcgcaatcggtgggagctacatgcagcaggcccaccagaaacgtcaccagcagcaacagcagcagcagcttcaacaagcttcattgcagtcgattactgacaccagtgccgataactcggtctcctcgtcggcggaggttgaaccggcatctgagctggacatgctcctatcagagaacgagcgcgcgaatctgttcgatgctatccgtgatttcgagtcgcctggtgctacgattgaccccatcgacgcgcagccttcgcccgagcaaccacctcagcaaccaaaccaggtgccgccaccgatcgaaacgaagggacagagcggtactccatcgatcagcaagaagaagacgacggctagccctccactatatcctggcacccagaagaaaagcccgcatggagcaccgcggcagctctcattggactcgtcatcttcagctcctcccgcgggtatgccgccgtctggatgcgtccccatgcgaacacgtttgcaccagattttgattcattccgtgcaaaactcggacgccggatcgtcgctatcgtcttacgagcgtaactacctgatgcagtcgccgttgtttttcccagccaaagctcccgaaaccgcgggatcactgtggctgctgctgcattctgcgcagtgcgaaagcggatgtgagattaatggttgcagcgttatgcgtcgcgtcttgaatcactgtctgggatgcgagttgatggtgggcaagtgcaagcagccgtgcaacgacgcgaaggcgatgctactgcactacggctcctgcaacagcaagggcagtatgcacggccggtcatgctcagtgtgctggaacctgttggagattgattattcccaccaagcgcttaacaacggcaatggcggacgctccggtggacacactccgatgaacacgccgtcttcgttcgtgtcgacgtcgccctccccgcacatgggtacttcgccactcgtgccgatgcccatgagcggatcccccgcgtatcggtcgccatcgagacggtcgacaagtagctctggctcatcgaccaagcacgtgcccatccagcccaacccgctcccgacggcatcgaacccgatgggactcatgggcgccctgcctccccacttcgggtactcgctttcgttgtacttggagcagacgtcggccccgttccgcgcggaggtcaagtcccgtgtcgagaagcgcgtgacggctgctgcaggccaagacttgctgcagcacatgcagaagaagacgcggctgcgtagtctggacgacctccgctcggaggcgcggacgatcgtgctgggcgagatggagcgggagctgcacctccacatgcaggcgtacaactgggccaactcaaccgccggcggcagcttgcccgagggggcctcgcaactccctccgtacctgctcaacttctcggtggcaggattcggcgcgttccaagcgcagcaggcggcgttccaggcagccgtggcctcggggtcgtcgctgccacctgctgcgccttcaacttcgccgccggtggcagctcggcgatccgggtcctcgaagctggcgccaagcggtagtccgcccaaggttcctgcgtgcgacaagtaactgagtgacggggttttagaactgccattgttgttgctgtgatgtaagaggtaggtaggtaggtaaggtgggggtgaccattttttaacggagtccatgcagctaatttattccgatctaaaaagttttttctcgctcattggattaaaaacctattctctcatgcccccattggaagaaaatagtcttcagccagataccgtatcgctcgctatctgcggcagttcaagatgctgcggacaaagctgatctcgcatgcgcctcgcctggcgcgcgccctgagcgcctcccgcgcgctgcagacggagtacgactacctggtgattggtgccggcagtggtggaatggccagcgcgcgtcgtgctgccagctacccgggaacgcgcgtggcagttgtggagcagtcgcggctgggcggcacctgcgtcaacgtgggctgcgtgcccaagaagctcatgttcatcgccgcggacatgagccacaaactgcaccacgactttttgcactatggattcgaggacgaggagaccgggggccacttggggcagcggacgcacttcgactggcccaagctcaaggctcgtcgtgacgcctacgtgctgcgcctaaatggaatttacgaaaggtggggagcagcaccgaggggttgctgaagtagcaaaggctatggacaaaccgtgttgatggagtgggggactcatgataagtttctttttgcttggttgcaggaacctggcgaattccaaggtggccctgatccgcggctcggccaagttcaacgacaaggggaatgtggaggtggacggcaaggaaatcctggcaaagaatgtgatgattgctgttggaggcaagccgctgatccccgacattccaggtgcgtggttactcgagaggctggggatttatttagtcgtcagttggttaacgtggacatggtgcttggacaggcaaggagctgtgcatcgactcggacgggttctttgagctggagacgctgccgaaaaaggtggcagtcgtgggcgctggttacattgctgttgagctggctggcgtgctcaacgcgctcggctcggacacgtctatcttttgtcgcaaggagggcgtgcttcgctcgtttgatgtaagttcaatgcacgcgtgcgtggcgcaatcgtgcaccccaggcttcttaccttccttcgtgattctaggacattgtgcgcaccacgctggaagacgccatggcaaaggatggtgttcacttgcggcctcacagcaatattgcccgggtcgagaaggcggacgatggcaccaagaccttggtgttggccgacggttcggagtacagcggttatgatgttgtgatctacgctgctggtcgtgtgccgctgacgtcgaacctgcagctcgacaaggcaggcgtcgacacggacaagaatggtttcatccaagtgaacgaatttcaggagacgtccaacagcaaggtgctcgccgtgggtgacgtctgcggcactcctgcgctgacccccgtcgccatcgccgctggacggaggctctccgaccgcctgtttggcggcatgaaggacgccaaggtctcgtacgagaacatcccgacggtcgtgttcagccaccctcccatcggcacgatcggcctgaccgaggagcaggctcggcgcaagtacggtgacgatgagatcaaggtgtacacgagccgcttcgtgaacatgtactatggcctgatcaacgagatggacgaggcgacgggcgagccgaaggacaagcccaagacggccatgaagctcgtctgcgccggcaaggaggagaaggtcgtgggcctgcacatgattggcatggccgccgacgagatcctgcagggcttcggcgtggctgtcaagatgggcgccaccaaggccgacttcgacaactgcgtcgcgatccaccccacggccggcgaggagctcgtgaccctggcgccttggggcctcagcgggcgcggctgacgttgaagcaagctgcttcaagcgaccgaccgcctaagcaaactgcgacgcggatagaggaccggaaactgtgaatctaactcggccgagagattccgctgacgtgttgtagttgaagtgtccggtcgtttttttggagttgcattcgtgaatctctttttctttcggctcgctactacagtagttattatgaggcgggtcgtgcggggcgatgaccaaaggatggcacctgcagcagggagcagggcagggtgcagccatgtcgttacgcggtcgtggtgacgtcgcctgcagcgacataccatattgcgatcgccgacggcggtttggcccctaccccagagaacgattctcagatgatactttcggttcgtacacttggtttttgtatgtgcgcttcaacttgcatgcacccgacacgtcactgcatctgactcctcggactccatcgtcattcccccattgagctcctcccccgcagcccccagcacttcgaccccgccgccatggcaagcgacaagcgcccgatcctctccggcaagcgcgcgcgcagccgcaggaaacgcgcggcgctgcgggccgccaaccgcgccaccatgtcgcccacgcctgagtgcgacagcgacgaggacgccaagcgcaagctccaggagcgcagagactccagcaggagcagcagcagtggcaaggccacctcgcagagcgagaccgaggacgacggtctcgtgttcgtgtgccgccccacgatgcccgacttctgctccgtcttcctgccgcgaggcgaggagccggcccacagccgcgcgcgcaagctgcagctgcagccgtcggactgcaagacgttcacggtgcacatcccgaccttccaggagacgtgcgaggggtttgtcacttacacgctggaactgacgacgtgcgaccagccgcaccacactttccagctcgagcgccgcttctccgagttcgtggcgtgcgcggcggaggtcaacgcgcagctcgcgagtggctttggagtgcgctgctgcgccgagctggaagatgacgaagagagcaaggacgcagacgacgccttccagtgggagctgccggccaagacgtggttccgcgtgacccagcacagcgctctagaagagcggcatgcacaactcgagcggtcgctggagacgctgctgctgcagcgaaatcgtcgcatctgcaacctgcccgtgctgcgcgacttcctcatgctcgacatctttggcgtgcaggtggcggagcagaagaacctcgaagcggcggcccagttcgagtgatgaagccgaccgctgcaatgaacgctagtcaccaacacaaattcaagcgcaagcgctaccagaacgacaagaagcgaaccagcgagcattgcgagtcggacgcagccagccagccaacctgcttggtcttttcatattttattcacgccggtccggtccaggccgagacgaccgagaccaactctcaactcctagacgagaaaaatagcatacacacgtagaaactcacccccagcgtgctcacgaggcatcagagtttgccagcggggcacccattataaaaaaatgttcaccaaatacaatacagcagggtaggcttttgaagtatcctgtactgcagtgcaaagcaaatagctcgacgagatacgaaagcattttgcagcttaaacggagcatgaacatgaggagtactgtacgcctctgctgacatcacgtcaagcacacgtgattgttttcattttcaagcggtctgtgtcgctcggcaatttctattcacgagtgcattttgtttttctcgcctacatgttcctataatactccagggtatgaaagccactgcttgcagaagatgaatacatcgccgcgcacaactcttagggacaagtatcgtcaccctcttgtgcgaacgccgacgcttgccattcacgcaaaccgccatcaactaccgatccagaatccttatcaactgtgtaggttggtgtctgcaacttgcagcctgcaggacgaaaagactaatcgattacatgtaaccgcgtgacgaattcgaactgcatctctacctgatggccgaagccacttgccgcgtggatactcccgagcaccaaccattgtcgatcctgtagctgatccccaacatcaaccatcgtatcgtggatatcctgtaggtgatcctcacattccgaatccggtttttcgggcagttcctgcttgaagctgcatccggctgtccaacgaattggcacaagacagtcgcgacgatcgcgtgcagcacgaccaggaccatcaagtgaaaagtgaagctacccagccagcaagtgcattgcatgcaattgtgcagcggtaaactattgtttagatgcctttcaacacgcccatgagaaaattccggtgtccggcgccaagtgtctcccttttctgatcttcatatggatacgagtatggaatcgcgtcttccgtccggaagcaaccgccccatgaaacagcaacacgcgatttgtttgcccgcggttttcactggatgccaagtgcgtcattccccaattcctcgcccaagcagccgcgcactaatggcctcgacgtcgtccccgtgggtggtgctcaagttcggcggcacgagcgtgtccaccgccgcgcgctggcgctgcatctgcgagcagatccgctcgcacctcgaggcgccgtcggccccgcgcgtgtgggtcaccatctcggcgctgtcccagatcaccaacaagctcacgcgcgcgctggcgctggccagtgagcgcggcagcgaccacatggagctggccaccaacatcgcgctgcagcacttcgcgctggcctacgaggtggggctcctgccggcgctggagggcgtcgagggcagcgtggagctgcacgaccgctggcagcagctctggctggacagcgtgctgagccacggcgacgacggctcgagcttctccacgtcccccatcgacccgctgctgcccaaggagctgcacccgctgctggaggagctcaagaacctcgtgcgcgtgctggagggcatcaagctcacggaggaggcatcgccccgcatccaggcgcgcgtgctggccttcggagagctgctgtcgacccacctgggccgctgcatcatggcccacaacggcctcacgtccgtggagagggtggacgccagagacctgctcgtgagcgatccctccagcgccaagtccgaggaggaccggtacctgcaggccgaggtaaacccccgtctggaccgcgaacaggccgagaacgccgcgcacggcaagcgcgtggtgctcacgcagggatttattgccagcacgagcacgggagccacctgcgtgctcggccgcggaggcagcgacacgtcgggctcgctcttcgcggcgctgctgggcgccgagaagtacgagatctggacggacgtgcacggcatgttcacgaccgacccgcgctacgtgcccaacgcgcggctgatcaagagcctggattaccgtgaggcgcaggagctggcggccatgggtgccaaggtgctgcacccgcgctgcatcatcccggcgcagtggggtaaggtgccgcttgagatccgcaatacgaacgacccgaccggcgccaagacggtgatccacccggccactgagtccgacaaggcccagcacggcagccccaaaatcctggctgtggtcaagcgccagaacatgacgacgctcagcatcacggccttcgacatgtacaacacgtcgggcttcctggccaaggtgttcacgccgttcgaggcgtgcggcatctccgttgaccttatcgcgacgtcgcagttttccgtgacggtgacgctggaccacatccccggcggcgtcgagggcgctccgttccagcagcttctggaggcattgaacgagcactcgaaggtgcgcgtgttcgaggactgctcggtcgtctcgatcgtgggtcgcggactgcgcaaggccctcgcggagctcggctgcgtcttcaacgtgctcgagaactacgacgtgttgctgcttagcgagtctgcggaagacttgaacctgtccttcgtgctgcagcagaaggaggcggacgaggtcgtcgctcgcatgcacggcttcttcttccccggcgacgaccaggtgtcgcctactgctgcgaaggctacatcgacggcaggaggtctgccgccgcttcctcctcacccgaccacacctactgctgcgtctaatggcgaggcaagtgctgctgtgccgcctgctccgatcaacaccgttttccagcaggcaaccatccgtcggtcgccttcgcgcgacttgctgttcggccccacgtggcagaacttgctcgatgctacacagtcgaacaaatcagcttaagcaaaggctggccggtggacccgcaacgtatacctggtcggttgtatttcatgtacgtagatagaagcccctcgactgctctcgaaagcaccattcgcgtggcaatagaaaacatacacaatgcatctcaatatgtttcctctctcacgattcgcaagtaagcttaacactctacgcgtcactgtcgctctcgtcgtagtcatcgtcctcttcaacctgtaatgcctgcgcgttcagtgttgttggcattggcttgtcttcgctacggctttcagcttcggcgccgtcgttttgtatccgtcccttatcagcgagctccgttttcttagttgtagaagacgctgttgctgttgcctttgttgctttagttgtcctcgctttcttggtcgttggcctggacacagcaaagaattatcagcaacaacttccgacgatgcacttgcaattgacgcaactcactttttggctgctgtcttctgtgtccgcctcttgccgcgagcgggtttgtggtacttcgcgtcgctctcgtcaattgcattcaccttttcgtgcaagaagttgagctctccgctcgccagcacgctcttcttcctgttgtatgcaagtcattgagcaaaagccacctctccacttcaacaacaaacacacgcgcacacgtacagctccacaggagtgagcccgactccgtccaccgcgtgtttctgcatcttgctcgccaagtcccgcacgaaaacttgcacggccgaagctgttcgcaccaagaagtacaccatgagtgcatcgaattccgtccgacatggctacattcccgacaactcactgcagctgagcacggcggcgtccgccacttggcccatgtccttctggtctttcagcagccgcttcacgcggccctacaatatcatatacgtagtaggtcagcgcaatgtatccacccgcccatcgcccacgtccgctgtgctgtcgccaccttcatcggatcgcgctgcttcatcttgtgccgctacggaatgtgaactgttggtcccaactgtctgcagcaacgactaaacggtacaccgtaccatttgttcaggttcgtcatttcagccgcagacgtccatcctggtcaagtcaaacgatgcttccaagaagctcgtggcgacagcagatccgcgcgctgcagcgccacgcccagcgccgccacgcgcgcgcgccattggccacgtctcgcgcgttgtcctccgccccttcgggtgctagcggtgacgcggagttcgcgctgggcgtcaagtacctgctgggcaaagccgacggcgcgggcgaagtgggcagcgccgcgtcggtgcacggcgccgtgctgcactggacgaatgcggcggagctgggccacgtgcgcgcgcagggcgcgctgggcagcctgtacctcaagggccacgccggcatcccgcgcaacgtggcgctggccacgcagttcctgcagcaggcggccgacgccggccacgacggcagctgccacgagatcggcaagctgctgttccagggcagcgacgaggtgccgcaggacttggagcgcgcgctgcactactggacgcgcgcggcggagagcggccacatggcggccagctacgacctgggctacatgtacgcgcaggggctgcacgtgggccaggacgacgagaaggccgtgcagctctaccgccaggcggccaagcaaaacatgcccgaggcgcaccgcgcgctcggcgctgcttgtctgcacggacgcggcgtggagcagagcgcggagcaggccgtgacgcacttccgtcgcgcggcggaggctggcaacgcgctggcgcagttcgacctgggcgcgtgctacatgctgggacgcggtatcgagcaggaccactccaaggcggcgcagttcttcttcctcgctgccgagggcggcgtcccgcaggcacagctgtgcttggcgcagttgttcgagaacggccaggggatcccggccgatcgcgagaaggcggtgcagtactaccagttggcggcgcagggcggactgcaggaagccacgcaggctctggatcgtcttggagcacctcacgagccggagaaggagatgtagacacatgcacaccgtaaaacatattcacgaacacaataccgaccacgtacgttgcagctaaactcgcttgacaacaagacccatagacactggtttggagtgtgctgttgaattgaacgatatcgtggtcttcgtccgaaccccgttggctcctgtgtgcctcgcaaaaaaaatctgccaggcccaggcccgcgcgaataacgaaacgtcgggtgcagcaggcgtcgagtgcaggtgcgctgagcagaggtcgagttggggcggtggcgtggacggcgaacggcgcggctggtcaatactttatctagaggctggtaaaatataacacaacaagacaagcaaacgtgttgtaagttgaggaacagtcacagaagcagcaacagcagccgcgagacacacgcacacagataaagccacgccccaacgggagcgctgctagagcccgcggcttgtggcttacgcttttagaacgaattccgcgacccagtacctggctttttcttctgcttgatttccgcctcggccacgctgtgcagccgaatgacgctcggctggctctggttgtacttctccgcgcccatggaccagtcgtaagacaacgtgtaggcgaagatatctccgcgcgcattgaacttgcccgtcgtgatcgactggttgctgcaattacacagcatcttggttagcaacgcagccttcacataacatcacccaacaattattaccacagcgtaccatttgttgaaagttttgagcttctggcgagcgtccttgtcccagaagcagaacgtgccgtctccgcccgtggtggcgaatgtaccgaacgggtggaacgcgatgctgctcaccgggtaaatatccgatccgtcgcggtggcacttgaatgcgaagtcgttcctgagatcgcaacacaaagcgatgttagtatcaccaactgataacaaataaaaagttgccgcaggaaagaacctcttgtccttgtcttcaacgtgctggatggcacagcgtccctcgatcgatccgatagcgaaacccgaagcatccgggaagcacgcaatcgtccgcgtcaggaacttgaggttcgactggatggacttgtagatctgcgaaggtttgcggatgtcgaacacgtgcacctggcggtcggccgtcgccacgaccagcagcgggtgcttgacgtccatggcgtagcagcgctccgagagctgcaccgaggccatgggcgtgggcgaccgggtgtcccagtatttgatcgtcttatcccaactgcccgtggccacgcagttggcctcctgaatcgctgcaatgctgcggatcggcgcgtcgtgctgcagcaataataataacatcaacagacagtgtcaggtcctgtcacctcgtgcatcaacgccccaattgatctccgtaccgcggcgatctgctggccctgcgcggggccgttcagcgtccacatcttggccgtcttgtcacatgatccagagaacaccgtgctgccgtcctaataattgggataaaacatcacgtaagttgctgtggaccataataatatagtaaagttattgccgcgcgcgcaccccgctgaaggccgtgcagagcaccggcccctcgtgcgcgatctgcgccttggcgactgcgttgaactgcgtgccttgctgctgcacctcccagcagcgcacgtagttgtcccagctgccggacaccagcacgttgctcgtggggctccacgccaggtcctggatgccgtcgttgatggtctcgccgatggtgtagtcattgttcgggttcaggtacccgccggcctgcgcgggctggccgaacgacatgctggacgctgctctccctgctgcggctcaagtggaatgcgtgggtggcttcgcgcgcggcaatcagcgttgtctattggctgaaaatacattggttaaaccaccaatccaaatccaactaatttcacatgaaatattgcggttggattgtattgtgatattgttacgctaacgtattattgttcgttgcagttgactgcaagcagacatttgccatcccaccgctgtaagtagtagcggctgatgtctcggccgatgtctctccacgcgagccactccatctgctcgtccgtcgtgagattcgggaacagatccacttgcatgtcgtggtcggcgtcaatgtggtgcagcagcagcgagtcgctcaccctgtcgtactgcagtcgctggtggccgcgcacgaccgacatcttgcgcgccgggttgttgctgaacacgacgtgctggccgaacgggaccttgcgcttgagcgaccgaccgacgccgtcctgcacgaagccgccctcgggcacgcccgtgatgtcggccagagtgttgaggaagtcgtagtgctccgcgacgtcgtcgatcatgagccccacggaatccccgagtcgcccctcggcgatgatcgtcgtgggcacgcgcgtgaccgacacgtcccgcaggtcgctgttgtagacctcgggtccgcgtccgtggtcgccgaagatgacgacgatggtgtcgttcaggaccccctcggcctccattcggtccatgaacttgcccagctccacgtcggtgaagtagcgcatctcgaggtagtctttgaccttgtcggcgcgatcgaggccttcgtagagtggggagaagtcgggcttctcggcctcgtcgtaccaggttggacgcgcgtagaacggctcgtggctcgaggtgctgtactccatgaggaacatgggcttcttgggctcgccccgagccaaacgctcgcgctgctccctggtccgattgatcatgaggtcgccgagaagcaggaagttgacgtcgtcgtggacaccccacgggtagctgcgcttctcctcgttgtaccattggtcgtgggtgaagccgtagtcgcgctcggccaaggtcatgacgtcgtagcagctgaacaccgtgtcgaacccgtgcgtggggaggaactcgtcccagctatcgtagttgagcagggagcccgtgtggaagtacgtctcgtaccccttggccgagaagaggtgcgggactccgaagagtttcgtgtcgttcctgccccctgcgatcccggtcttggccacgttgtcgtacgggacctgcgcgaacaggacgctctccagcgagcggctcgaggggctgctcgaccacatgttgcggaaactcacgccgcgcttggcccagcggtcgaagttcggcgtgactgtgatgttggacccgttgaacaggttggacgggtcctcctctccgacgatgtagcgcgagtcgtggtgccggaaggactcaaccgagaagaagatgacgttgggagggttctccgggtcgatgtccacgtcgaaggcgagctctccgcggaagcccttggtgagtcggtagagcgaattggcgtcgaatagctcgtggtcctcggtctgataatggatgtacgtttccgcccacgcctcgaggaattttgagtcgaactcctgccgagtgatcacttccggtgcgggtaccaaggcttgagtgaatagctggtcgagagctgcgttcagagccgagtacgcgacgagagccgagcacgagctgctaattcccagcacgaacatggggaagacgatcagcgccgtgatcactacgccagtctgtgacagtcgcaggtagacgtcgggttcgttgtcgaagcttgcgtccagcgacttggccacatccgagcagtcagggacttcttccttagcaagtttgtcgtatgcagatcggtctccggacgcaattcctcgtgacacggcgaagttgaccaccaagtgtgtggggttccagctcgctacgtcggcccaacgagctctcgcgcgcaccgtagcaaagaacgcagcgacgatgaccatgatagctccgtggaggtagccctcgtggaactcctcggccgatatcggggccgcgctgatgtactggatgttgttgtaggccaagatgaagatctcgactgtgaaccgcagctcgcggaggcggacgaggagcatgtcggagacaaacggccccatcatgagcacgaagagagtccacgataccaagaacgttgcgatcttgctgaccaggcgggcgatgcgcttccgcttcacgaagtccgcgtgctgtctgccaccctggtgtcggcactgctcgctggctgcttgcttgacgatgtcgaacaaccacagcgcgcagacgaagtacgtggcgcacacgcagtcttcaagtagcccgagtgcgagtacactagccttgacttcgagagtgcagtcggcggaggtgccgtacatcgtgatcagagcgtcgagcgtcttgaaccggtagatggagaagaagagcagcacgacggcgtaggcgaacagccacccgaaccacggcctggcccatccggtcacggggcgtttggtcttggacagaacgtgcttctcctccggctcgacttcttcgcagtccgcgatagccacctcgaggaggttgctctgctcttcggcatcttggatcaagtcacgcctcttcatctcccagtctccactctccaccggaagcttgggtcgttggaaggggattgggaagtgaccttagcgacttgcctgctgcgttggattccctagccgttttacggaaattgttatggttgtatggtttccatgctttggtccgagggttgtccatagagttggtaacggtgcgggcgtcgtttgcctgtcgcgcccgtttgcttggcgtcggctccctagatcacaccttctgtctacttcaaaagtgggctccccctaaaacgagagccaaaagtcgcacaaaatgggctccctcatggtaagtacgagatcaaggagccctccccattggctcccctccagggctccccaaatcgatgcgccacgctagaagatcgagctcaaagatcgccacactagcccttaacgagggctcacagttctggagggctcctttcacttaacctattgaactcaagagcccaggagcccgagctcgcgactttttgggttcacccaagagcccaggagcccgagctcgcgactttttgggttcacccaagagcccaggagccccagggctcgtagaaggtgtgccctagatcattgcggggtggcagctctggcgattctgggtcaagccgtcgctccaaagcggctaagccgaccctatcgccaacgaccgtctccacaagcctcggtcgcaagctcacacactggactttagagctcacgtaggatcaagtgttgccactgcaggaagtgcgcacttcccgcagtgaaacggtttcgcctttcgctgagtgaagcttttggggcccccactagtgctttgtacagggtcattaccattgttcttgagggtcaaacaaactggagtgcgtgccgtagtccactagctgtccgtgcggtcgacggcaagcaggcacttgccatcccaccgctgcacgtagtatcgactaacatcacggccgatgtctcgccacgccagccactgcgtctgctcgtcggtcgtcaagttcggaaacagatccacttgcatgtcgtggtccgagttggcattgtgcagcagcacggagtcgcccacgcggtcgtactgcaaccgctggtggccgcgcacgaccgacatcttgcgagtcgggttgttgccgaataccacgcgctcaccgaacgggatcttgcgcttgagcgatcgtccaacgccgtcctgtaggaaacctctgtctggcacgccggtgatgtcggccagggtgttgagcaggtcgtagtgctcgacggcgtcgtcaatcataaggccaacagagtcccccagtcgaccttcggcaatgattatcgccggtactcgcgtgatggatacacctcgagtgtcgctgttgggaacctcgggaccccggccgtggtcgccacgataacgacgatggtgtcgttgagaacaccccccgcctccatgcggtccaagaacttccccagctccatgtccgtgaagtaccgcatctccaggtaattcttaacgacattggcgcgctccagaccttcataaagagcagagaagtctggcttctcggactcggcgtaccaagttggacgagcgtagaacggctcgtggctggagatggtgtagtgcgtgatgaacgttggctgcttgcgctctcctcgagccacgcgctcattttgttgccttgtcttgttcagcagtagatctcccacgagctggaaactcacgtcgtcgtgcactccccagccaaaccggcgcttctcggggccatcccattgatcgggtttaatccccatgtccgtctccgctagatcccacatctgcacacgcccccaaacgttatcgtagccgtgcgaagagaagaatacgtcccatccgtcgtagttcaacgcgcagccagtggtgaagtacgtctcgtatcccttcgccgcgaagaactgcggcatcccagagagctccgtgttctccttgccgcccgctatgcccgtcgtcacgctgtcgtacgggacctgagcgaacaggatgctctccaacgagcggctcgtgggagtacttgaccacatattgcggaaactcacgcctcgcttcgcccaccggtcgaagttgggcgtgacagtgatgttggagcccctgaacaggtttgatgggtcttcttgtccgacgaggtagcgtgagtaacgactcgaccgccagcaccataacgttgggcgggtttaccgggtctacagcgacgtcgaaggcgagatctccatgaaaacccgtggtgcgtcggaagagagagttgtcgtcgaagagctggtggtcttcagtctggtagtggataaacgtctctgctcaagccttaggacgtgtggcgtcgaactcggctcgcttgaattcttcgtgggaaggcaacaggatccgactgaatagctgatcaagtgttgcgtttagagcagagtacgcgacgagagcggagcttgagctgatcactccgacgacgaacatagggaaaaccacgagacccatgagaaggacggcggattgagacacaccgcgatagagcatcgcctcgacgggcgcgttggtgttcagggatttcaacccttccgttgtggttcggccttcatctagagtgagtttgtcgtacttatatccgcggcgtgagcctttatcaccgctcggtcgacgcggtgctgttgagatcagctggaacgcggcatcaaccaccgcgtttgttggatcccagcgagccaagtcagtccaccgcagttgcgcccgcgcggttgcgaacaaggtggccacaatgatgacgatccctgcatttacgtagcccgcgttgaactcctcggtggcgatcggagcagcactgatgtactcactctcgttgatggccatgacaacgaggtcgagcgagaaccgcatttgtcggagtcgcaccagcagcatatcagcgacgaacggcaccaccgccgcgacgaaaagcagccacgacgccaagaacgtagcgattttggtgctgattcgagcaatgtgccgtcgcttctggatggcagcgcgctggttgccgcctgggcgtctgcagcgtacagtgacagcttgcctcacaaggtcgaagatccacagcgcgcacacgaagtacgtggtgcacacgacgtcttccatgacgccaaacagcagcacctttacccgcagaccgagagtcaagtccttggcacttccgtacatggcaatgagatcctccagcgccgaccaccgatagacggagaagaagaggagcatgagcgcgcaggtgaagctccaccccatccacggcttcgtccagaagtcggcatcgaccacgaggtgcaggagcttgaactttgtctggagctggacagggtcctcctccgggtccacttctccattggcgatgatggagacctccaggagctcgctccgttcgtccgcagcctcctcttgaaaggagtcaccatccactgccctcatgttcccaagaagactcgatcgtggcaaaggaagttgaagaatgagcactaggagcttgcacctagattcccaagcgcacgtccattgagaggagcacgtatctggggcggaggaggcgcgcaccggagacgcagcacccgtagggtacctgcagttacatgtccactggtgcttgcttagtcttttagcaattaattggccgaaaataggtttcattccagtattgacgaccatggcggaggagcccaagcgcaaggacacccggacgcacctgacgctgcagcagaaggcccagctgcgcgccttcctggcggccaaccccaagctgccgcgcttcgccgtggccgactgggtgcgcgagcacttccacgtgcggctggggcgcaccacgctctaccgcatccagcacacgcccgaggcggcgttcgcgacgggcaacctcagccgcaagaagctgcggcgcgtcaagttcccggacttcgagcgccgcctgctcgccttctacgaggacaggcgccagcgccgggaggacgtgtccgacgacgagctgctgcgccaggcggccgagtgccgcgccgcgtgcggcatcagcgacacggagctcaagctctcgaacggctggctctaccgtttcaagatccggcaccagctcacgaacacgcccccgcagcttcgagagaccgaggcgggggtgacggaggacaggccggtgcaactagagctgcctcaagtggacgcacaggtcgctatggctgcagaggacgtgacgctgtcggcgcgagcgctgacgacggtgcaagcccccgggttcttcaactgggagcccgtgggggacgttccgcaggacgaggttgcaatcgtcgaggacggcgtgttgctcctgcagccaggagtgttcgagctcagtgtacacgtacgacacagcgcgccgccgacgggagtgccggcaacccgcatcttcaaggtctattgcggcgaccgcgtggcggggcagtgcgatacgccgacacaagtagagagcgacgtggctagtagtatctgggtgggggctaatttgctggcaggggctcaggagatgctgaaggtggagttcctcgctcaaggctacgccttctccgatagcagcctcgtgctgcggcgcaggatacagtgagcgaagggatctaagcaagtgataatatatttggtatgcgtaccgttgcgtttcaaatctccaacatgctcgtgaacgtgggtcctcatcgctgttcattcttcaactgttacctcaagatacctggagctagctgaagctggaaagccgatggcgaacaacctacgaccacgaaacgtccacgtgcgaggataatgcttgcaagcgtggcaatgggactgagttactcatttaacaaccggagcactagccgactaccgctatgaacgacacctgccccatgatactcgactcgaatcactgtctgcgccggtaacgtgcacccaagctgcagcacgctcaaggcttggtcgtctgcccatcgaatagaggattcacactgacccagtaactcgaccccagcccacactttgaagatgattggcgagctgtcgctcggaagcgcactatgctgcagctctacattgagctgaaccatcgcgttggttaaaacggcaacaccgtcgtcgtccactgagaaatactcggcgtgagccatcccgctgttcagtttccacctaacaaaccccaccgccgtggcggggtctactgagactgctgacaggtatgtaagtggtcgaatgacagcaggaacgctagctggttcagatatcacggatgcctccagcgtagtagctgagatgtcgctattagcctcgagggcctcctgaatggcgacgctcgcttccacaacgctatcttcatcttcttcatcatcatctccagtttcagaaccgtcagagacgtcattggtctccactgcgtcaactgcatcggccataacaacgccggcgtcaaccttccgttgagtagctcttggcttccgcttgggcttcccgctgtccatagcatcggacgcggcctgcgttgcatctccattatcagtcgatgtctgtgcggactccacctcttcccctgctgctgcctgcggggtgacacgcagcgcgtgcctctccttgaaccgatgcagccagccgttgctcagcttgagctccgtctcggagatgccgtggcgcgcgcggagctccgcggccgcgcgcagcagcgcgtcgtcggacagcgcggccccgctgctctcattggcccggcggctctcctcgcagaaggccaggatgtccctctccagctccgggaacttgacgcgccggcccttcttctgctgcgcgttgcccgcgaaggcgtcggcgggcgcgtggtagatgcggtagagcgtggcgcggcccacggacacgccgaagcgctcgcgcacccagtccacgacggccagcagctgcaggtccgggtgctcgctccagaaggccttgagctccagcttctgcgcgttggtgaggaacgtccgctgcggcggcggccgcttgggcggcattgttcgaggcggttggttgatttgccaaaaagcggccggaacgttggggatcagatttcggccgttacgctaaaacgctaaaagctgaccgcgccgaaatcgccttgtgctggttatagagcgtgtatattcgtgggcggaaacgctgggctttgcatcagcgagttgaaggcgagccctaatgtcgctgacgccttgaaggagtgacgtggccacttttacgcatgggattctatccatttataaccttccgtattggttctatcgatagtaagagggctatccattcacactatctaaagatgcgtaatcgcatacctgtgaatatcgatattattaagtagatcagctttagtcgctgcctccacttcagaaaccaactcgcggagtaggcgagcgcacttgggagctgccctccgcctcgctcttcctcctcttcgcgggcatgcgccgctccttccatcgcgcgctggcggccgccgtgctggcggtcgcgctctcctgcgcccccgcggcgagctccgacgtctccgaggcgcgcgcgtccggtacagcccccgcttcatctccatcttcgtcttcgctcattccctcgctctctctgaccccactctcccctgtctgcagactccattgcgccgccgtctcctctcgcggaggcgctgcgacgcgtgcagaccgacaacgcggcggtgcgcggcctgagcgacgccgcgctgtccccgctcgtgccccgcgccgagcgccgcgacgcgctggtgcagctgggcgacatgtacttctacggcaacagctcgctggacacgagcgtgaacggcacgctggccatgaggctgtacgccgaggcggcggctctgggcgcgccgcgcgcgcagttccacgtgggcgtggccaagagctacgggctctggggcttcccgccggacgaagcgggcgccatgacgcactactacttcgcggcgctgggcggggacatgggcgcggtgatggcgctcggacacaagcatctgctggggctcggcgccccgaagaagtgcgagtcggccgtgcgctactacgaagtggcggccaacgaggccgtcgcgcgccgcgagcagaacgtcagtcacccggccatctacgacctgccgcaccgccgcctcaagacgctggccgagacccagcacaagaagaacctgcccggagacagcgccattgtggactactatcagttctcggcggacaagggcgaccccgacgccacgctgaacctggccacactctactactacggcgcgcgcggactcgcacaggacttggagcgcgccgcggcgctcttccagaaagcctacaacctcggagcgagcggcggagcgtaccacctgggacacatctacagtctgggcattggcgtcccgcagaacaatgccacggcgttcaagtatctgcaggaggcggtgaacgagggcaacactgcagcgcagaacgagctggcgcacatgtatttgcaggggaagggcacgcaaccggacgaggagcaggcagtggcgctcttcaagtcggcagctaagcagggcagcatggaggcgttctacaaccttggcgtcctacacatgcggggcggaggctcaaagggcatggtgctcgcctcggggcacccagaatacgaggtcgctcacggatatttccagctcgcagctcaccagggccacacgatctctagccacaagctcggccacatgagtctgcacggtatcggcactactcgatcctgcagaaatgcggtcgagtcgttcaagatggtggcggagcgtggcgagtgtgatcgagtgctctcccaggcgtacaaggacttcaagcgccaggactacgaggcggccttcatgaagtacgctgtcatggcgcagcagggctacgaggtcgcccagcacaacgccgcgtacttgttggattacgacttcttgacgccgtcgccattctcgcccatgctgtcgctgatgccctcggcaattgagctggacgaggacactgtggcctcgactgctgtcatgctgtacaggctggccgcgcagcagggcaatgtggacgccaacctaaagatcggcgactactactactatggaaaaggcggccactccgtggactttgtcaaggcgagcgcgcactattcgctcgcaagtaagcgctcgaacgcacaggcaatgttcaacctggcgctcatgtacgagcacggaattggcgtggagcaggacttctacctggccaagcgcttctttgacaaggcgcgtgtagcacatagcgacgctaatgtgccggtgactcttgcactctggaagctgcgggcgcacaaatcgcttcgggcgtggaagaggtggtgggacgaactcgtgggcaatgtcccgccatctaagaagatttctgctccccccgctgcttcgtcgggcggcgtatctagcagcgtggctggagcgacatcgaacgcggagtcgtcgttcctgtctcggctggaaaagtggtggcccggtgacgccgacaagagcacagaggcgctgctgcgagatttgttcagtaactggcgcgaggttttgcagtctgacaacttcctcatctttgtattgacgatcgccctcggtgtcgtcctttacatccgctccgagcgccaatatttacaagcaccgcccgtgcagcagcagccactgtagtcaagtcagtagagggaatgaccaccgaggtggacaagactaagctgcaacatcggtatgattattgcatcactgcttgctgttctacaagtcccttgtctgttttgctgtccggcgagtctccgagttgttgctgccctcgcagaagcatttcctgttggctcttgagcatgcgtttgagctcgaccatctcggactcaagctgcaggagccgagtctcgctgtcgtctgcgcgttgttgctctcgcttgagagcttcgacgacgacgggaaccaaccgcgcgtatgccacgtacttgaatccgtcagctgcagtggacacaacttggggcacgactcgctcaacttcctgggcgatgaatcccaattctcgccgaccgtcgtgcgggaatttgttcgggaactcgtctgagttgtacgcgtactcaacgccacggagctgcgagacaatttccgaggcgttgctgatctggtggacgtttgtcttgaagcgctggtccgaagcatccacgtaggcccctgagcccatgacctggccgtccacggtcacactggccccgaaaaaggcctcgtcctcgacgaatagccccccctgcacttcaaccatctcgatagctgtcatgttgacgttgctgatgtggccgccgatgatgtcgacgccgcgcagctcgctctcgctcatgtcgatggagccgcgcatgcgctgagcctcgattctctcggcagtgagcgtgcctgaagcagcttcgaagcggagactgtcgtgctgctccagaacaccgcccttgccgtacacggcgacgaacccggcgcgttggccagcgacttgaacagactgcaccgacagcgtgacctcgcctaggttgaggtcattcgcagcctcaaaggttttcacccccgtgagcgacgatgtatcaaagactgcagcagtcaacggacgccatacaccgccatcgaagacgaatatcgctgctgcgccggccgctacgttgagatcgccacctaaaggttgctcgtcgtcgttctggatgaccagaagttggccagcatacgcatgttcacggtcaattcgtgcggtgttgggggatgaaacaccgtcgcttgtgatctgaacgtagctgtttgtgctaggaatgacgaggtgctccgaagcgcgaagctgcacactggaaaacacggcctgggcctgcgagacaagcgcaccgttggcaataacccgcccgccgcttgttgtcgagatatctccacgagtctccaaattgcctagtgaatctacggaaaacgtggcctccgtttgtgctccgtagtcgccgagatcaatgggctttacagcttcaataaggtggaaagggggcctctctcggtgttggcgcgatacatcaaagctcaacaacgcccctgcaaagttcgggttggtcgaagccacttcaagtgacttgccgttcacttcgtccgtgtgaactgtaagcccgccgtcttcgatggcgaaaccatcctttgttgtgagacttccagattcgatatgcaccccgccagcctccacacgcaagccgccggaagtgatcgtctggcctccagacgcgatagtcacgccgcctgcaagcacgtgcagtccaccaccatggacgaatgtagcacccgtgtcctggacttcaaagaccttgctgtcgctgcttctgcttcccctcgcttcaatcaacgggctagatggcgatgcaccttcattgttgtcgcgctgcagtaacagcacaggaccagagggcgcagctagagttgtctggccgttcttaagactcagcgtgccagagcgtacagccaagtttccactttgcacatcaagtcccccactcatgaccttgattccgtcagaaagcacctgaataccgccacgctccagcctcagaccaccctttaggatctctaggccgccgccgtagatgacagtctggcctgcgccgttcactcgcaaaatgggacctttaggttgtgagattcggaggaaatctggcaacgtcgacaactccgaggtagatgcaggactaagtctctcaatattgagcagagcggcaccggaggagccagtggcgctttgtagctgcaaatggagaggcgtatcttccagccgtgcgcgtccatctttcatctcgaaggagccatctttttgcatctgaaagactcctccaccgctcatgtacaggccgccttcgcgcagttggagtgaaccgtggtgccatgtagtgtctccgcggccattcatcgtaaacaaagcttggccaccggcgtcagctcgcatgaagtgaaactcggacgacaacccgcgcgttgccgacaaacgcagtacgttccccttgaaaaacggtcccagtgccggcccaaccagcacgtcttcatcatccttgttgttgccgcagtgatctccgtaaaacccctcgtgacacgcgcagatccctgtgtcagtgttgcaatcgccgtgcccactgcactcttcgtaggacttcacatccgaatccgtgatactttcgaacacgcactgcactgagcctgagggcgacgaaagctgaacattggctgcgtcgcaccggaactcggacgctggtgggttgccatcgtggtagtacaggttgttcatgatggggaacgtagggaacgtgcgcagcgtgatctcgaatgttgccgcagcagacgtctcgaaagccactcgttcacacgtctgcgcgatgaagatatgggttagtatcgataacatgaagagcaaaaagcagctatgtcacttaccaggtctccgaggttttggaaacggcggaaaatggaggtgcaaacgtcactcgacacctgtgcgagtggcaggtcaaactcgactgtatgcgcttggaacgtcaacgtcagagccccgccggtagcttcagcacctcttgtagctgtgatgcgcagccgaatcttcttgtcgttctgctgggtcgacgtggggttcgatccatgcgggcacatctctgccagatcaggaaaacacccacacgggttcgcattagcaggccatagtggttaaacacgattagctgcacgcactccttgagcagcctggcgagttgtatccccactggcaattgcacacgtgctccccgtgccgattgatcgcgcatgtgccgtggtgcgagcactggcttccttcgcctgggcagtgcgtccccttcagctcaattgcgtgcgcgagtccacctccagcctggtgaagagcagcaagagcgaggcacacgaagcagagcaatgcaacgcctcgcgcccgaccataatgctcgcagataagcttagccatgagagcaagcgcgatgacaagccacgttggccaggaagctgcaagggacgaaatggctgcaggaagatcgcaataggcttgacaaggataacgccctttcacaagatacgttcggtgacagaagaccagctgaagaggcattcggtggtgggactgtacgcctaaaaatggctacacattgcagttgaccggccaattgatgcgcaggacatcgctctgtctcaggccattcgccatctcgctccgctacagtttccaagatgcagctccactgcctgctcgtgctcggcctcctagcctgtggagcctccaagctcagcgacgcgcaccgtttcaactgcgagatcatgtactgccccgacgagtacgaccccgtgtgcggcacagacggctacaagtaccccaacgtgtgtgagctcatactcgaggcgtgcagggacaaaacgaagaagcttgaagtcgcctacaacgccacttgcgataagtcggcaaccgggaagaccagctaatattgaatgacttcacgcttcagacttcccttcttctaagctcaaaaatgacaccgatctgaacaacacatttcgttccacttagacacgtgaaggtttgtcgtataccttgggttcttccggtatgtccgcaggcttgagcgtagccaggaaattcgacggctccgataacaacaggacatcggtgaagatcgttgacttctttgttggagtgcttgcatcgcctgccacctctttcgcgccagagttttcttcctggacagggctgccgtggtggcgagtcgccactggcgactgggtgggctccgcgccaatgggggacagtccacatctcgataggcgaaggatagtgcacaatacagtacagtagacgcaatgcggagacttgcgctggtgcttgcagcgctggcagcgacctcgcaggccgtcgaggttagcgtctgcggcgacgccacgtacgacttgcccgaggaccgaggagtggtctgcgcgtcggccgatccgatacccccgggcacggcgtgtccgctgaagggcgacaaggcgagcgccgactgcttcgagaacctgccgtcgtacgctagcggcgcttgcgtagcgcccgaagacgcagtgtgtgctttagtgacagactcgacgtggggatgcgtgctactgtccgtggggtgcggtgggaagacacttacgacggcagccccggaaattcaagagaaggtgtgcgagacctgggactacgacgaagacgactcggcggcgagtgtcgacatggacgcgctgtttgacgggaacgaggactacgacgagagctggttcgtgaaggtgattaaagtgacggaattattcgcgtgcggtgcggacaagtccacgccggcaccgacctcagacgcagacacgtcgagtttcgatgataccccagcgcaggcaggcagcacggacgcatcggcatcggcatcggagccgacaccagcgccatcggatgccacagacgcgtcttcagccgatacagccgattcgtctacatctgacgcaacgccagcgccgacagaaactacggaaccatcggacagcgccgagagttcgtcggttgatacaactgagtcgtcggcagcatcgtcaacaccagcaccgacagacactgcggactcatcggagtcaaccccacgcaagcggacactgaagagagttcggaaaccgacacctccgcgtcatcggccgcgtcgccaacgccggcgcctacagactcgtcagaatcgaagcctacacagtcagacagcgccgagagttcgtcatccgatacaacagaatcgtcagcagcgtcgccaactccagcaccgacggacgctacggacgcatcggagtcaaccccaacgcaatcggacatcaagagagctcgtaaaccgacacctccgagtcctcagcagcatcgccaacgccagcgccgacagacactgaggattcatcggaatcaagccctacgcagtcggacattgaagagagctcggtatctgacacatcagattcatcggaggcggcgcccacaccagcgccgacatcagattcggagggttcaactaccgagcaatcaccgccagacaccgccgactcgtcaacgcccgaagtgactcccgccgcaacaaaacccgaggcaaaccaagaggacacgggatcggttgatgccgagtagaccgccgtctctgcatgaacccacgtctcttcttgacaagccatcgcgcgggcggaccagcctgctggatcccgagaagcaggcgtctcggtgagtggctgactgagccaggtggtcacaccgcgatgagctggagatgaccgcagaggcgagtcgagtcaaactttgaccgaaaaaatgctcatcagctctacagtgtacgtcacgcacgggaacgctgagcgaaagcacctggacggtgttgccttcactgtcagcgagagcaggggtaaggctcccaacggagcaggattcgtagttgatttatcgttgtaattgtaccagtagttacggtggctttgacagctatccgaggcctcgaaaatggtacaacagttcttgccgaactgctgctgtctacgtggttgattgtacgcacgttggttgcggtggacacggctccgtggcgcactgggagcgcagcagcttgcagacttggcccttgttgcagctcacgttggcgcacgtattggcgcagaacttgtcggtgtcggactccagctccatcatgcacttctgcgagctcttgcagagcgtgccgaggccacaagtccggcgtaacgtgctgatctgcgagcacgatttgtagtcgactacccagaggttcccgccggccttgcacctggctgcattgaattggcacgggttcgtgtacgtcacgtcgtccgaagcgcacacctggagccgattgttggtgcaggtgttgtcgcaagaatactcggaggtggaggtcgatgtgacggtgccgaacagactggggctgctcttggactcggggacgtagccttcgcacgcatcggtagacttgagcgacagcgttttgtcgcggcaggcggcgttcatgtacacacagaagttgcggtatgtgacgccgttcgtgccgcacacgggcgagtcttcgtcgttgcagtagccttcgcaggggttcgagtagctctccacggacggcaggagaccgtggagcagcagcaacatcgtcagcgtcagcgccgagcgcagtggcatggtgcaagccatgttttgcagcaggtcaatacttgtcttggcaggttgagcagtcgatctaattcgtgtgtgtctttaggcggcgtttgaagacgaagacgcagcgccacggaccgctcgctaaaataaaacgcgtcttatctttcgtctcggtagcttgcgttcctacgcttccgacgctacgcttgcaactgcaaagacgtcgcaatgtggaagcaaattctgacgcatcgacactgacctgagccatcgccgtccgggtcaacttgctgaggtgaacttcctgcatcgccgccgtcgagcaaacccacttcaacttgcttgcttgatgtgtatggtgtacgatacaccatctaaccggtactaccggtagtgtatctaccctattcagtttagcaagttttgttggcacacacttgagccgcaaagctcgacttgacctcatgctgcgtcacgtgctggccgcttcgcggggacccgcgcgggcgcgcgcccagcgcctccgccacggtatcagccgcagcctctcgtccgtgccgattctggagcgcggcgacggctgcaaggctctgcaggtgggcgagacgtaccacaacttcacgctggagcgggtggcctctgtgcccgagtacggcgtggacgcgctggagctgcgccacgagcgcacgcaggccaagtacctgcacctggacgccaaggatccgaacaacgtcttcgccgtcatgttccgcacgccgcccagcgactcgacgggcgtggcgcacattctggagcacacggcgctgtgcggctccaagcgcttccccgtgcgcgacccgttcttcaacatgatcaagcgcagcctcaacacgtacatgaacgcgctcacgggctcggaccacaccatgtacccgttctccacgaccaacgccaaggactggcgcaacctcatgagcgtgtacctggacgcggccttcttccccaacctgagcaagctcgacttcctgcaggagggccaccgtctcgagatcaacgaggagaaggacggcgagggcgagctcatctacaagggcgtcgtgctcaatgagatgaagggcgtgctctccgacagcaacaacctcttcggcacgaggctgcagcaggaactcatgcgcggcaccatctacgagcacgtgagcggcggcgaccccaagcaaatcccgtcgctgacgtacgagcagttgcgcgccttccacgccaagaactaccacccgtccaactgctgcttctactcgtacggagacttgccgctcacggaccacctcgcgtatctggaccaggagatcctcaacaacttcgagtaccgcacggactcggcggccacgcgcgtgaacacggaaggcttcagtgtgcttaggaagacgaaggaagacccagagctcatcgtcattcggggccccagcagcaacatgagcggcgaggcggccgacccgaacaccaagttctgcatgagcaagttcgttgacgtcagctccacggatccgttcccgacctttgtgctgcgcattgtgggctacttgcttacgcacggcccggcgtctcctttgttcaaggcgctgatcgactccaacctcgcccaggatttctctgtgggcacgggctttgatacatcgacgtactaccctactttcggtgtcggtgttgagggaattgaaggcggagaaaccgctgtgccggccattcgcaaggccgtgcatgatgctttggagaaggtggtggcggagggcttcgagaaggagcgcgtggccggactgctgcaccagttggagctgagtcttaagcacatcaccggtaacttcggtcttcaaatgatgcacggtatcagctcggtttgggctcatggcggagatctgatcaagaacctgcagctaaacccgctgctcgaacgcttgaacgaagagatggcgcgaaacccgaagttcctggagagctacgttcgcgactaccttatgcgcgacgacctgcgcgaggttcagatgctgatgctgccttctgaagactttgtccgtgatcaagaacgtcgcgagcgcgagaatctggccgctaagcttattgagcagtccaattcggatctggatcgtatcgctcgcacgaccgagaagctcgagcgtcaccagcaaaaggagcagcctctggaatgtctacccacgcttaccctggacgacattccaagggtcgaggaaggcaacttcgaccacatcgacaagacgcagctcaactcgacgtccgcagagttcgtgcgcgtgccgtccactaacgagatctcgtacttgcgtctcctcttcgacatgtcggcgcttcctcaggcgtaccaccagtacatgaacgtgttcacgacggtgttcggatccctgggtacgtcgcgctacgcgtacgacgagctcccgacggtgattgcgaattgcagcggcggtgtgtcgtgctcggctatgacggcgccatcgctgacagacgtgcatggcgagcccagcaagcagtcgatgctcctgggcacgatgtgtctgccgcacaaggtggacgagacgctgagcttgctgcacaagttgctaactgacacccagttcctgagcgaggagaatctgcgtcagctgcgtctcattttgcagagcagcgcttccaccgctagtagcagcatctcgtcctctggcgccgggcttgctggcacgcgctcgcgtgtcggcctcacacctgctggtatgtacgacgagctgtacagtggcctcacgcaaatcgagcagctccagaagtgggcacagtgctctgacgacgagctgcgtcggattgctcgtgtgctgcaggatattgcgcgcgtggtgttttcgcccgacaaccttcgcctctctgtcgttacggaggacaagctgcggtctcaagtggagcaatccctcaagtccaagctgctggagccgctggcggggtcttggtcgctgccagacgcttcgtctctcacgcttgcgaaggaggagctgaagctgcctgctgtgtcgcccaagaactactttgcgttcccagtgtccgtgaactttgtggtggagacgcagccgtcggtgtcgttcacgcacgaggatcacgtgccgcttaccgtcttagctcagatcatgtcgtcctgctatctgcaccagcaggtgcgtgaacaaggcggagcatacggctcgggcgtctcccagaacgagggctccttctcgatgagctctcactacgaccccaacacattcaagacgctcaacgcgtacgctggcgctcgtcagtgggcggccagtggagagttctcggatcgggatcttcaggaagcgctgttgtcggtgttcgctagcgttgacgcgcccaagacgccgtccatgaagggccgtatgagcttccttcgcggcatcacgaacgacatgcgccagcgccgtcgcgagcagtacctctcgttgaagcgccaggacctcgtggacgtcgcgcgcaagtacttcagcgaggacgcgcccgagaagcgcaccgtcatcatcggcaaagacggcgacgacctgcacgagttctcggacaagggcttcgacgtgcagcgcttctcgtcgccggagcagtagacaaaccacgcatgctggcgtggtctcttagagcactagaagagcttggaactcactggttacaacacgatttcaagcataactatatatttcgttgcggcgccacgcctcgcctcgcctcacctcgccttccttgggtcacggtggtgcacgtgcacattcagtcttcatctgcctggctgcgtcagtagtggtaattgttgttctcctcctcgcccgagatcgtgcggcaaatggggcagtcgaagcgggtgcggtaccattcgttgatgcagtgctcgtggaagaagtgtccgcacggagagagcacgagccggttgccgtccagctcggcccactcgcagaggcagatcgggcacgagtccgagtccacctgcacgtcgcgcggatccacgtacttgagctggcggatggatcggacgtgctgctgctcgtgctcgatcgggaactgcaggaactccttgaccatgaaccttgtggacgcgatctcgctgcaggcctccacctcctgctccgcggccaggtactcgcacagggcgatgatgaactcctcgagtccggcggtgcggcgccccacgagcgccgacgggtccttgaacatgacgatgcgacgagggaagccgacgtccttgagctggtcgcgcacggcgccgcacacggagcagcctcggtgcttcttgtgcgccgcgagccgcgcgagcagccgcttgcgcaggcggtagaactcggagtagcgcttgcacacgacccacttctgcttgtagtagtcgctcgtgatctcgaggtggtacacgtagtagttgcccgaggcgccgcgcacgagcacggcctggcagcgcatggccagctgcgtcatggactcctggtggatgcggtggatgagcacgcgcttggcagccatgccctggtcggccacgaggccgatgggcatgtcctggaagcgctgctggcccaccgatttggccggcagccggtagtgcgtggcctcgggctgcggcgcgaactgcgcgccgtagaacgacgtcatgtcgccctccacgtcctccacgtcgaccgactcggcggccgacacggcgggcggccgctgctgccgctggttgtcctcggcccgccagcgcgcggcggcgccgcccttggcgttcgggctgctgctgaacatgctgctgatgtcgtcgttggagcgcgggctgtcctccagctcgctgtctagccactccacgtcctcgtgcgccatggtgtcgcctgcgtcgggtacttgtgtcggtgtgcgagcgctcgaactcgcttctgtctgcgggtcggaaaaaaattgacggcgcgagcggcatacaaagatcaagtgtttgcctcttccgtgtggaaaaaacgatgtggcgctgcgtgcgtcagcggattggccgggagcgtcggagatcgcgcgcgcgattggatgaaaaggacggcgccgataacggacgacggcaatcactgccgagccgcacaaacaccttgacccgtatcaatcaatcggaccgagtatcagcgccgagccatgcccaacaaggagtgcctcacgtgtaagccgggcgacgacacgcaccaccagagcgccgtggagagcacgggctgcgaggagagctacctgcgcgtggacggtgagtggccgttgccgttatggcgcccgttgcgcggctggtcgtcgacactcgggctctctttctctctgctgacgcctgttcccgttgtgattgccagcctgcatgaagctcaacaacggccgcgtctcggcctgcaccgaggtgagcccatgagcgcgtcggaattggccccgccgccccagtactaacgatgcgttttggcgtgcaggagtgggagaagttccgccagtgccacgaccagggtaagcccgtgtccaagcgcggcggcgccagccagtgaggaggatatataggcaagcggcagccatgcctgctacatgatcttgatcagacctaagctaactcgcacaatagacagcattttttctcgcgggctccgcgctccaacgtgcgtcgcctgcagactcgaaacgccggcttgcgactagctgcttcgggcgagaaggagccgttgtggcagcaacgccggggtccgtgcgttgggtggctgcaggagctccgctccgccgagcaggttgcgttgcctgtcagcaacatgaatgctgagcgcagcgagctcgctttgaatcagcagctccacgcgtcggaacgcagatatcagcagcggcgctgtaggcaatggtgggtggacggctgggacaccgctgcattgctgcactgcaagccactgcgcgcgttccggtcttgctccagtagactgccgcgcgcgcccccgtccagtcaagcatggcgggcgctgtaggcagcggtgagtgtattcggagcacgttgaagcggtctggccctggaggctcagctgctgctgagcccggcggctccaatttcgctggtgccgccgtcgccgcggtcctgtcctcgggcgtaatcgcggcagacacgaacagcgatggcccgagcgctgccctctgcggagccccggataccggtactgcaaacggcgacactgctccgcggcggacatgtgtgcatgcacccgaagggagctgggcgttgtgggacatctgccagctgggatccccgcgagaccagggcggaccgatgtcccaggcactgcctggcaggcaggcagggcagcgccccgcagcgagcgtgacagcattcggtcaagcagacggccagccgggcggcttgattcctgccggcgttcaactgcgccaacccgcttcaaccgcggcagcttcgccttccttcaagctcgctcgaatcaaatccggcgccgcgtgcccgtatatcgctgggtgtattatcgacaggctctgctgccgcagtcgctgcggatccaaatgccgccgccggtctcctctacgccgaccagccgatcgaagagcgccgctgcagctggcgggcggctggtcagtgccgcgaggtcgtccggcgtccggaggtagatagcgagcagctacatggcgagctcggcttcgacgctggaagatttctgtcgagcggcggcgctggcgcagagggaaacggagcaagcaagtggcgagcagcgctcggcccaagcagctcggccagcaggagctcagccgtcgccttgaagctgccgtctgtttctgcgcctgttcgtggtgtttacgcaagagctgcgcgggctaggggcgccgcgacgctttgcttgcggctttggcccggccagccaatcagtgggcggcaagtaggcatttgctcgaattttgggcggcgtccagggttgagcgatcacaattgaatcggagccggacccgcagcattctcatccagcgatccgttccggtgcacccgcgacggaggaggacactctcagagacagacagagccgcacaggaaggctaggcccccgcccgccccgcgacgacggagcccctcacagcagcagacagacgccatccggcccggcagcagcatgatcgtggtattcggcagctcgaacgccttcggacgcgacgtgagcgagatggagatgatggtgctggccggcacggtcttcgtggtctcggtgctgctcgtgctcgtgtacaagctggcgcgcggctgggacgacctggacaaggacgacttcggcgccagcgtgctgccgctgcacgcgccgcgcgccacgaaccgctgggtcagcagccgcaagacgcacttcggccgcctcggcacgatcaaggagaacgaggtcttctccttcagctccaagatgcggtgatcggcgcggccgcgggaggaggatcagcagcggcggcggcagcagcagcagcagcaacaaccacagacaggaggacggcgctgcgtccgccttggagtcaggccggcgcacgcggtcgaagggtgcgctggcccgtgtagatttagatgacagccagtatttaagcctcgccgcaccggacgggtctggacggcgcgggggggctggcggcgctccagccaccatagatgtcatatttatcaagacaagacgtttctcgtttcttaaccccggttttctcgcgctccccccgtcggtttaacgccgccgaatccagcgcatggtgtcgccatgggctcactgccgccgtttcggcgcacgtgcgcacaacgcgcgtgtggatgaatatccaggcgcgtcgccgcgttcgcgccattcacatctggcgcggcatctggagcgacgacagcgtgtcggcaccatcttcagcagctcctgcgctgtcgtcgccaattgcgctgccatctcgttatgtcgtcagagaagggggccgagtgatcaagctcgggctttgacgcggaggtgatcaagagcggcgaaagtgccctgaagccgccacatcagaaagaccgagcaaggaggagacgcaggaaacatggaggagccaacgcatttaacttttaaaaattatccgaaaaaactgtaacctatggcacgccactcctgggcggcagagtgagcagtgcgcgtaagctctccttgggctgcgccacgttaccgtatgccttgaaggcgctgtcgtggtacgcgctaaagagcttcgccttcttcatctcggcctccatgatcaaccggttcacggtcagcatggacgcgtccaggagcgtcagctgcagcatccaaatcgacgtggcaggaacccatagcaacgacgccaaggccaaggtcaacaaacgagggtcagttgaatatcatcgggccgcgggaaaagatcaaagatgccggcatgtacctgctccgtggttgaacctaactgctgaagtgccgagcgctggagggcctcgacgctctgtgtgaccttcaactcgcacggcatcttctcctgctgctcatggccttctaccccagcctcccctggggaggaaccgtcgctttcagcttcaccctgtgcggacgacctgtcagcctccaacgtcgccttcatgtctagccactgcttctcttcctcctccaagctgtaggcaaagagagaaagcacagggtcagcttcgagcttcacgaaggcggcaccactgcaatgcgcacacccacctcttaatccgctgctcgtacgtctcgattgttgcgcgcatccgtgcgttttccgggttcggtatcttgatctgcgatttaaacagcgctgttagataccgagtagctcgctgacctcgattggcgtcgtaccgcaacgttccctggcggatgctctgccataaaggtgatcagctgctgcttcatggcctgcaagctcgtttcgctcagttgcatgatgtcccgccgagcggccgacgtgaggaactccttcctcactttacggagctcgcgcttcacctgccgctgcaccatgtgatagagcgagacctggtcggccgacagcttcttgtgcttcatcgcctcctcgttgtccgcctcgcgcgccgcctcctcgcgcttcttctggcgcacgagccgcctcatttcagccctcgctgccttctcctgcttggcgcgcaacgccgccgatgcagcggccgcgtccacagcgtgctgcttccccacgtccttctcgtcgtcctttcgcacgcggaagacgaacgtgttgtccttggcgggcgtgccaggcttcctcttgcccacgggcgtggcctcaacgggcgcctcgctggcatcctcgtccttcttgtcgctgaacttgaagcctcgtcggggcctccgccgggcgtcgctgcgacacaagaaacaaatgatcagtcagcgccgtccactgagcgcgaagaagacgcggggaagacgcacctcgggtcggcagccttcctcctcctgcgcttctcgcggcggacgaccagcggggcggacggcgcagcggcgaacggaggcgccaccatgacacggagcagctccccggcgtcaactttcgcgcctttgcgcgctctttttgaatgttcaaaccacccgattggccagagaaggagaaaaatcagggacgaagccgattggtgggaaatcggaattagcggggtggtaccaaggtgttgaagtcaagttgcagtccgcaagaagatcgcagcgatggcaaaatggggcgataaagtacacttactatcgtattgcttagcgttcactaggtagctttgtgggctcgtatcaataaatacatgggacggcggcgggctcgcacgctgcgtcggcgtagcccacgcacgcaacgacactcggacatccaacatccatcagcttcgtccgtccaccacgtttaggccgcctccgcttgagcggcggcgcgcggcggggtgaagtgcagcacgtcgatcgtgatgtcgtcgtggtagtccctccggtttccaggcaagacgttctccaggtctgccgcggtcgtgccgtaaatctcggcgatgcgctccagcacggcctcacgcagagcctggctcacgttctgcaccccttcgtcacggaagcgccccacgagctgcacgatctcttcgttcttcagctccccgaatagtccatccgacccgagcacaacgaactccggcttgcggtctcttaggtcgacctggaaaatgtccggaacggctgcaggttttcaaaaatgcacacaaccaagtcagacataattcacacaaaccatataaacccaatacgatcaggaactcaccagagatgtaaggccggcggaaactgccgcggatgcgaagaccacgcggcattggggagcggttcacatccttcaccttcatgtaagtgtcgccaatggaccgagtgggctgaagccggcccttgacgtagaagtttttctgtccgatctcgcacacgatgtcgtagtcctcaggatacagcacgcgcaggcgccgctgctcgcgctcctcgttcgcggaatgatcgaacgttatctgctccacgctgagggatccgtccgcctcgcgatacgccatgatggcacgacagtcgccgcagctcgcaacgtacagcttcttctcgatcacaagagccatcaccgcgcaggcacccacagagcaggacgaccacgatccgcgctcgaacttgatctggctgcggcgcttgaactcttcctctgtatccttgaagcctgtgatgatggagtgagccactggttcgtcgttctccgtcagatggctgcggatgttggcgtaaagcttcttctggacaaaatcgaccgcctcttcaccgccgtggccgtcatagcacccgcaaaagaacacgggcgtctcggagcttctgcctggtcgcatgatggagtccacgacgtactgggatctgtcttcgttcttgcagttggctgcgtagctgtccatgtcgtagcgccaaaatagggcggcgtcattgctggggagcacttctgagacctgcggcggcacggacgtgatcgggatctcttcgaggggcatctcgtcgaagtcgatcttctccttggtccattcgggctggatcatggcaaacagcgcgataagcattgcgctccacgacgactcgggcggctgcggcttgtccgatcggtttggagcgtcctttagcggcagggagctcgtaactgggtccttcggcgtggtggcggccatcaacgcgccagttgtgggctgggtcaagcgcgaaggcgccagcgccgtggcgtttgtgctatcctcgctcgaagacgcggcggccgcagccgtggcggcagctaccgcgcccatggacgacgaggagtcgggcgcggcgctggccgagtggatggccgtcgtcttggccagcgactgcgtggccctggcctgcttggcgagcgccacgacggcgctggaggtggtgggcgtgacgagcatcctgctgggcgtggaggaggcgcgcttaaggcggctctgctgttgctgctggagctggcggtgctggtgctggtggtggcgacgagccaccgcgcgctgggcgcttcggtaccagagcagcgagcggtggcggcgcgagcagctcagcagagacatctcccactgccacgggttcagctcttcgaagtcggtggtgagctcaattgtgccgaggtcccgagctgcagcggtcgtgactccccggctggcgaaagcgcgtgtggcggcttgagctttttgggttcttgcagctcgggcgcgagactcaaagacaagaggaaggcgaaagaaatgcgaatccgacagtgggactgcgggcccatactctcttccatactaaacgtagaagccgatgaacgactatgacagggattacgagggtttcatttgcgacgactgcgactgataggtggtgagctgcaaggtcgagctgtctgcagcctcctgctgttcagcaacacagcgacgacaggctactgttcgacatacttgttggcaggccccggtcaacgcctcgtaccaaaggaggacggcagagctcgcggccgattgggcgaagtggaccatttgggggtggctcaattgagcatactcaaaccaagtatgcacgtcaagttgaagttgctcatggaaagtacttagattgaccaatcacagcgctcgcagcggcgggacgatctcaacacacgagcatgcacgtcaagcgccgctggccgcgggcttgctgctcttgctgcgcttggggcgcgactgcggctgcgccgacggcttcgtctcgccagcgcacttgtcgttggcggcggcgggcttctgctgcccgcttttcttcctgccgctgggcctggcggacgagctgacagtagcagcagcagcactagccgggcccgtggcaaacgtctcgcccgccgccttcctcgcggccttgcgctccttggccttcttctgcttgttctgcttgctttggctgtccccggcgccatcaccagctgcagctgccgatgcgccaccactagcgacggcactgctcggcttccgtgcacgcctgttgccccctggcgctctgctgctgtccttcgttttgggccggcgaccgccagagcctgctgccgatgccgctgctgcagcggccgctcgggccttggccgcttgctcgcgctcgatctccgccagaatctggcgctgctgctccaggaactcctgctcctcctgcagcttctggacgtccgcgagggaaacatggtcgggaggtcggaacaggccccagctattcaccgtcgactgccgagcaggagccacgccgcctccaagacgcgccttggcctcgcgctcgcgtgcagctgcggcctcttcctcttgctggatctccttcagtgtcttcgacttgggctcggtgccgaccgtagattctgtcgccgggctgctccaagtcggagcagcaggggctgcgaccttcccgcgagcgccacgacgcgcgggctgcttgaggaacgcatcgagcgagaacgcggtcacttgttcgtgttcgacgccgtcgtagcccagcatgtgcttgcccgagaccggcagcggcgagaaggtcagccgcggacttgccgacggatggctgccgatgctcatcttgcgctgcctctgcgaagctccgtcgaagctgctcttacgcagagaagacgccggtaggggaaacgcatctgggaatgcagtcgcagcggggataaacaccggagacgtagggggtgcgcacttgctctgggatgccgatggtttcttctcttccaagactacgggggagacttggaggccccacggggcatcagcaacacgtgcgggtactaccacaggctttttctccataaacgacgtcagcgggacgaacttgctgttcttgctcttccgccgtccacttggcttactcggcgtcacgggagtcttaccggaagagttttccgcgcgagacgccgctaccatcacgtcctctcgcgcatccttccgagcctcagctatcgctgcagtggcctcattagctgtcgtgttcttgctcgacgacggctgcttccccattctgttatcattggcaggcttttgggccacctcgaccggggcggtagcgcaggccttctcttcaggctccggttcatccattggtggcagcatgatctcaaagagcgtctccatccggtctcgacccacgccgtccagcacagcgtcccaattgtttcgcatgtagcccaggcagtattcttgcaaacggaacgcagcatagcgctcagcgtactgccacaccagcacacaattcgccacgtcaacatgtgccgcgatcttacgctccaccagctccaccaaagagggcaccgcgtcctgggccgcgacgtggggtgccgagtcgaagtccgggaggacgggagctacgagcactgccgtgtgttggtggcccgctgcaaccgccaccgccttcttcacaccagacacacgcttcggactcggctgccacgtgttgcctcgcccgtggccgagtacaccttgctggccgcagccccaagtcacgagatcaccttctcgcgtgacgacggcgcaatggtcctgagaagcacagacacttgccacgggacccgccttggttagctccactttctgcggagcactgggcgatagagttgttgatgcattatgtcccggcgtaccggcgctgggctggtgcgagagtgctggaacattgtgcccccaagtgaaaacagcgccactagcactcaacgcgatcgagtggttctgcgcgcacgatacgtccacaacgtccatgccacgctgcttgcacgtggggacccatgcgtcacacataattgcaccagcgccgctgccactagcagcagcatcaaacgggatgttcacacggcttggacggtacgatccatagccgaactgccacacctgaccaaggctgcgaccattgtgagagcagcgcagcacaacgcacgtgtgccaatccgagagtgccagtttctctgcctgcacagaatcatagtcaccgtacacgacgcacatcggatggcgcggacgcagtgcatcaacactgcgcggagtcgcgtcagcctggtccgtgccacatccttctttacgtccgagctggcctcgacgattgctgccccaggtgtacacagcaccgtcctcggcgtcaattgctgcagaatgacaaccagacgccgcaatgtccttcatctcgtggaagcggaaagcgtcaacacgttttggtgttagtcgactctgcgacgaacttgatttccctgggtgtccaagctgaccgaagctattggagccccatgagaaaacttgacctgaacgagagagcgccaaggtgtggttctcgcctgctgccaccttcttcatgggcgtggtttccagcgacaccaatcgtgtcggctcaattcggctatcgatgcggaggtgacacgcaaagtggcggttagcaacactctcagtaggtagagcaacgctacagactgcatacgtactcaaactcattcccagtgcctaggcggccacccttgccaaagccccacacgaagcactcgcccgctgcattgagcgcgattgtgtggtacttgctagcactcagttgaacaatgggtgaggcggcaggaagctccacgagccgcggcgtgacttgcacgtccgcgtttggcaaatgatagcccagctatcgatcaccacagtcattacagtagcgcagggtcagcatcacacggcggtgaaggcaaacaaagtacttgtcgccagtacctggtagtctcgctttccaaaggtgtaaactaggccaccgtcacacgcctccgtggtggtcgcaacttctcggtctggttgtcgttggtgctgcagtctcgtagacagcagctgcatggggctctgctgggcatgatcacgtgtttcgtgcaggtatttccgagcaaatttcttgccgaagcgggtctgcgcgtggcgtaagagtagcagcgttgctggagagggaacaacgatccgtcagcccgagaagcagccacagccttgatagagcagaggaaatcacactcactggacaaatgctggtgatacacactgcggtgcaaaggcgtccagccagactcctgctcggcacgaagaagaggtcagtcagtcctccctctctcctccagtctccgctagacgctgtctaacgcaacacacccagtccgctgccaggaggtctgccccatgacgcaacagcagctgcactgcttcgtcgttgccgcgcgccgccgccacgtgcagcgccgtctcgcccaggtcgttgcggtcgtcggggggcgccgcgtctcgcaacagacgcgctagggccggcgtcgcctcgagcgtccgcgcgcaggcccacaggtccactggctcgtcgtcacgagctggcagttgcatggttggatccgtcgtacagtaaagtgtattgttggttggcgatcttctctcctctcttctcctctccctctcctccgtctccgccccctttaggccgccattgtggtcaccattttgaggatttctaccactgacgccgtccgtcgaagggacacaatagtttgaaaagtcatgtgcaccacccagtacttaccctccatgttgatgttgaagtgaaaaaatagttgccgtgcctccatcaggccacagccatatgacgcacgccgcgccgcgctccccagcgcccaggcccgcgcgagcgaccgatggcagcaccgtcgaagcggaggcccccgccttctccccgtcgagctccttgtccgcggccgcgcctcgccacgcgcggcctcgagagccgccgccactcgagcgcgccgtcgtctcgcgcacgcggttccacatcacgctgccgtcgcccccgtcgccgtccaaagcggcagctggagggggcgaggccgaccagcgaggctggagcagcccgcacggcgagccctaccgcccgctgggccgcccagagctcaagctcaagttctcgccgcagcttgtgtacggagtcagccccatgatgcagaacgcgcaccgcatgcgcgccatcgaaggctctggaggagctgggggcagcaatatgggaggatcagccaactccggctcggagaaggacaaggagctgcgcgagccgtcgtcctgtacgaccactggcggcacgggggcgcccctcacgactctggtggaccagtttgtcacgtcactaaccagcaggaggcggccactggatgagcgacaagtcaaacttgcccatcgacttcaagccaacgtgggcggcttctcacccgagaaggtccgcgggctgcaccgacgtaagccgcaacttcaagagcaggatcacgaacccaccggcggcgagcacagctattacaacagtccgcgaggcgacacgtcctaccagcttctgcgcgaagccattgatgaaggcacgagtcggctgcgctcctcacgtaatgggacgagctttctgcagaagctacctccgtccgacctgcacggactccaggagctacaggagcagtacctgcgcgcgaggacgaagacggcacagttactgagtcgcggcagcggtggagggacgagaaccagtcctcgggtgctggtcggatccaagacgtacaatgatgaagccacgaccacgcacagagcccaagtcaatcggaacgatggcacctcccaaggacacagcgaaagcgaagatggtggggccccctggtacttgccatacacgactcggcaacttcagcgctcacctcaccgacgtctaccgtcgctagaggagttccgagtccggataaaagacgagaagcagccctcaagaccctttcgagcatcgaccaatatcaaaccaaaccaatttcctgctagggtgcaagccagctcagcacgatccaaccttgcatccgtgacatcaaggcgaagctccatgggcaccaccgtcggggtgtttcatgctgtcggggagaatagtgacgatcacacccaagactccagcaccggtatcaagggcgcttcctctccattttcaattgttactgcctccccgccccctgtagcggtgacaccactgcacagcatcgaaaagctgcaagctgcactagacgctctggaagccactaagtcccagcaatcggccaggctggtcacggcgctagaagtactcgagcaggatcgccacgaatgcctggccgggaaatttcgtagcttgcatgttcgctgcgatgctgctgaggacctacggcgaatgcgggagcgctcagagcgttaccgcggacaacgagcgctcgcggtgctatccaaaactgcagactggtatccggaactgttgcgacgtctgctggcccgagaagtagctagtgcgtctagtactggaacaacaacggcaaatgctggcgggctcacagcacctctgcatgctgcagagctgtttatcattcaaggtgtgcgtcgattcaccaacgatggatgcgaattccaggcgacacagctcttccaggtaatattgcacttgcatcacgatgatctggaactcctgcacgtgcaacaactgctcgtatatctccgcaatgcattgcacatcaaccgcgacgagtggttgcaagtttttgccgcacacgatctaccagcgcccaacgacgacattgcagaggaccgcaaagacccaccagagcaaccgcgacacgggtagctctcgtgctgcaccgcttgaatcaagcgcaagcacgactcagggaagctggaaggagcgggggaatgattctcgttttttagtcccggacggggattttgtctgctaatctgtcgcggctgtggcattcggcatgctgcctccgcttctgctcctctaattgccgtctcttcgccgcctcaaccttctcgtcaagcaagcggcccaagatgctcaggaagagattctcgtcttgcacgtcatcatccagtgcatcattcaggacttcaaactcgtccttgccgtcttcggctccgatgaaggaggatgtaggagatcgagcaccgttgtgctccatcgaagccttgtggccattggagggcgcactcacgggagtagcgatcgacccggtgtatccattctctacgtgttggacagaatccgatagagcgcttgatgccatatcgtcccaattcagtgagaagcgcggcttgtcgcccccatttagctctgaatgtctccccatgccattcgaagtggggaacttcggacaatcttcatcttcttcatctgagctgaacggagcgtaacttgcccagaatccaggcggagatcgtgcaccacttccaacaggagagcgcccgaatgcagaagattcctgaagtgaaggagggccgattgacacgcgcaaatttcggaatgccgctcgaggagacgatggtattgcgatcggtgcagtgccttgtccttcttctgctgcaatggactcgttcgccttgatgactggtgtgatcgttggctgcaaatgggcgtgctggaagagagcgtcattttgcttgcgctgcttcacaacctgcagctgatggaaagcctcgatgcacagctgctctaagatggagggcgtgtccagatcttcacgacacatgatccgagcaatctcgtagagtaccaggtcggcgcgtacacccttctgcagcaccatgctcgcgataatcatgtttcgccgacatgcgcgtcgcaaaggaattcttctcgccaaccgatccgcgtcttcctgggcagatagtgacagcacataagcccggtcctctgcgctcagtggcttctgaagctgcggccaattgtaccagcaccagtcgcaccaagcaatctccaggaactgcggtaagcagtaaccatggtcaatcggtattaactcgtactctgcgtgccctgtagtcggcgaccgccgtttgcgtacgagaatattggcgtcgttgcggtctgtgttcaagagccgcatgtccagaagcacaatcttgtgcacttggtgggtcgagaactggttaggagccaagtcgctcaccacgtcatcgtgtcggacaaactcctgcagtgatccaaccttgaaatgcaacgcgcccgcactaccagcatagttaaacacaggatgtcgcgactccacgagagacgtagctggaactcccgcaaagtggtcctgtgggtgacaaaaaataataacccgttattttcactaccgctctgaacgagcaaccattaatgacttgccaaacttgtcattaccttgtccagcaggtacgcggccagctcgcgttcacatgcttctcccgacagaattcctcttcgaagcccactctatcgaacaggttgcacagattgaggggacaatatcagacaactatgccaagacagcgaaagtattaacacgcgacaaacctggcccaattgacccacaagtccgcgcggattgttaggcccgaacggctcctcgtcctgaggcttgaagcaccccacgtttcggtgggacgggtccttgaaaaaatacgtaccgccggtaccatccatagccagcaccggtgcaagtccgagtgcgagaccttgtagcgccttcatgccacggatcggacacaatcggtcatacctacatccccatcaaagacagcaatagcagcgctgcaacatacctgatgcgtgatcttcatcagcgccacgggcagcagatgcgcgccgtaagggtggatgttcacgacgggcatctgctcggggcgcaggttctgggacgtcttgccgttcactcgagcagacacggcgctcttcgctccgctgccttcaccgctgttcctgccgctgctcgcattgctcccgcgctcgtcgtcgcactcgcgcgtgtaggtcatcgcgaggttctgcggcctccgcgccacaaagtccaccacggcgttgtcctggtagatgccgcactgctgcaggttgtgcgcgttcttgagctcgcgtccctggtagaagagcttctgcgcgttggacggcacgttgaaaacgacctgcagctggtccttgacgtccttgatgctggcccacggccgcagcatgagcttcttgcggcgctccagcgggtcgcggaagtccttgacgaacaccaccacggccccgtggccgctctccagccagccgcccggcagcgagcgcgacatcttcgcctcgtccttctgcatcgctggccactcggtcgtggacgtccgacagtagattcccagctacacgggggaagacagctccgggcggtgaagcactcgggggcggagtgacgcagaactagagtaagcacgccgtggcaagcagggctttacgtgacgaaccacaagaaagtttttatggccaatgagcgtcgcggaaacagagtcggcgtttgattggttaaaatattgggtccaattttttagccctccaaatccaggacaaaaatatgtaaaagttattttttgcacgcggtttaaaaaccgtgttcgacttgtacacaccattcgggctcgattaaaaaaggactgcttccgacccaattgttggtttgggaggcacgtagaaaaggcaggcttatccagcccggttagcctaggcccgaatttcaaacggtatatgcagcatcaaggaacttgatgcatttggtttgagaggctttcgtctcgctatccagttaaccataaacgaatttatgcgcggttttctcgtcttgttatggctgtcaagatatcgcatgacgagcaataggggggtcagaattagctttttcgccgacattttttggccgaaatggtcaccataagaaatatggtcagccgacatatccatttcgcgaaatggttcacctgtttggccgaaccatttctgaaatggtcagacattttccgaaatggttgaccatttttcgacttatggtgaccttcactctgtttatcttgctaaatgtatttacgtcgatttacacaaatgtcgagcacgtgcgttgcgatgcaccagcgcgcggagcgaaccggcggcggcagcggcggcgctcttctggacgctcctgcgccgcgcacatcgcggctaggagctagcgcgagctcacgcgcgtgcactgtggtgctgcatggcgccatgggctgctcccttgtagcgccgcaacgggaaggatggagcatgcccaggggcggagccagggccaaaatgggggggggggcgcatgcccccccccatttttcggcgaaggcgtttcgattttttagacttttttttatttagacggcacatgcatgaagttcacactgttcctccgcttagttgataataacatggaaggaaagaggaagcagccggcaatcacgaccttctttgtgaagaagccccgtcaagagcccgaagactttgacaaggcccgcagtattgaatcagatcctgggccacgaccccaacctgtaacgctgcgcgaaaaacaagagcaagcagcgttggaatggtgttcgctcaacaaaattcctgatagagccgaagaatgttccgctggagactttgttaggcgggatcctgctcacagaccaccaaatttatttttcgttaagcaactgattgccgatcctcagccactgcgtgacgttatactatcctacgttcacctcggtccttaccaaccgcaactcaagcaatatccagcccgtgacatcggtggatgcatgcgtgctcttcgggcccagtggtttgaatacaattatggctcgaatactctccttcgacggacgcggtgtattgcttatgctgctacctcagccgagaagtaatgacgcagcaaagcgagctcacagtgtatgcacaacctacaacgggctataggaactggaaaaagaccactacaaaagacggatttgcaaggctctgaattctcaaaagattggtgaacgacaacaaaaccgggagcgcctgacttttattctggatatctgccttctcctagcaaaacacgaaattgcatttcggggcagcgacgaaaagatatacgagcggtttaatttttatgtaagaaatgacaacactggactaacgtttttttactatgcacaggatacgtcacaaaataaaggcaattttcttgagattgttcagttcatggcacagcacgcgccatcgttttctcgcgcaatgtccttagctggggaaaacgctgtgtacacatcgccacaaattcaatgtgaactgatcaaatgtgcggctgatgttgttcgaaagcatattatggaggtcgagattgcagatggatattttcctgttctggtggatgaagcaagctgcatggcgaagaaagagcacatggctatcgtaattcgttttgtgtgcgctgcaacggggactattagagaaagattttttggtactgtccatgttcgcgatacgaatgcggagacactgtacgatggtttgataacgcagttagagaagtggggattgcttttggcgaattgtagaggtcagggatatgatggtgcgtccaacatgtcgggtgattttactggtcttcagcgacgtctacgctctcagtgtccttatgcctactatgttcactgtttcgcgcatcgacttaatctcgtcctagtttcagtgactatgaacacggtctcggtggtgcaatgcttcgacaccgtgcaagggattcacactactgtaagtgcttcgtgtaaaaggaaagatcaacttcttgacgaagccgctgtggaattggaaaaaatgcttgatcaaggacatctagaatctggtagaggtttaaatcaaccaacttctaccgagggtcttagcaaaacaaggtggaattgccacattcgcgcgttaagaaaagtcaagatgctttgggcctcaattacaagtgtattagagcgtgtagtggtcgatggtgtgaacccccacaaacgcgctgaggcgtcaggaattttagagaagatgtggactttcgacttcgtatttcatatggaggttctcacagcagttttggggaaaacatatcggctgtcccaatttttgcagaaagatgacgtcgatatcgtgtcagctgtgaatatgacgaagcaggtatccaaagaactaaaaaaatgctcgatgatagttctatgactgggaactcgccaagttttgaatcgatttgggactcatcggtgaatttttgcaaatcaatacaagttgacgatacccctctcattcctgacaaaaatgactcgtggaaacgacgcggaatgagaagtcgggtgtgtggcaggactggaattccaggagcggactcctccagggatggtatccagtctacaaaagaagctcactatcgtgacgaagtatataactgtatccttcgtgacctgctttctgaaatggattcacgatttagtggagaagtccttagtctcatggaattgtgcggatcgctcagtccacgtgataatttcaagaattggagcgctactaaaattgttgagctggctaaaacattttatcccgatgatttcaccgatgagctggacgaccttcgagaagaggccactcggtttcgcaatttggcaaagatcgacaaaaggttccaaaaattgaagacaacgcagcaactatgcatccaactcgtcgggaccgataacaacgagctgttcccgaccttgcaccgaattattaacgtggtgtgtgtgctgcctgtaacaactgctactacggagaggtctttctcagccatgaaaagaattaagacgcggctcagaacaacaatgggagatctttggatgtcaaacctgatggttttggctatcgagcgtgatcttacaaacagcatcgacaaagactcggtcctcgaaaagtttaaagggatgacaaaaaggagaatcgaaatgtaggttgtggattttacaaaaaaaaatctatgccccccattttttttaaggctggctccgcctctgagcatgccaccctcgtgtcgtccgcggtgtgctgcgccttcaggcaagcgcatggcagaccggttagcggcgctaatgttcctacgtgcgtcctctacgcagcgctcctatcgcagggcagggggctcatcggctgcagcttgctgcacgagctgccaggcacgcgcagcaagctgcagccttgcatgtgcacatgaagtagataagctacattctaaaaaatgaccggtcatttcatatctgaccggggtgatattttggaaatggtttggacatttttgggggctctcaagtggtgatattttttgcaccatttgtcaattctgaccccccctaataggaccggagtgcgattcgtatgatataagaaaaaaagtacacggttggaatttgtttttttgtttccgtaaatgtattttcatctcaacgattttccaaaactactttcagtgttttggaagaatctgttttatttttatgcaatgctttagtgggctatatactgtactatataccgtacttcataaaataaatgcttaacaaaaaacagcggctttgaagcgttcttcggatggttttgaattaaatttacgttttgtccaatcagaatgcagtattgtgcaaagtcttaacacgaaaaccgcagttttaggaaaaatcggggcgttttaacgttaagatgagtgcagttttaaccctatcgcgaaccgtcttacatttgtatagcatacaatgctctccatttttttttgcaaatgggctcaccatgagcctattgccaaaagagaggtacttgagatattggacctttactatgtaagagatacaatagtggtatgcggtagtttttttccaattataattgtatagtactttatagtatgacactacaaataatctttcaaaataagtatacaaagtactggtgtcacgagtccataagctgtaacatctagaggattcgatatgcaacgtcgaagaacttgatgcatttgatttgatcggtttttacctcactatccagttattgtaggctactgtaagcgtattaatgcgcagatctatctatcgtcttcttatgacctttaagataccacatgacgagcaattgaaaactgagtgcgattcgtattatgataagaacaaatgcactgttgaaatatgcttggctcggtaaatgtattttcatctcaacgatttaccagaattactttcagtatttagggataatctgttaaggtttttgaagtgctttcggctagtgggctatataccagcgccgctttgtagcgatgggacagccaatacgcaaaaagtaccatttgattttcggccaatgccatgtctctcacgggacgtacgttcgtcacaagtcacacacttcttcaacatgaccgcttgtgatggtgcgctagcgcgttggccggtatgcatgtgccttgcatacttcgataaaaagaaaatacactcaaattctcgatcagatttacgttcatttcagaattttcctcgatcgtgcaaggcggtcatgcagcgctcaagcgacgccacagcagcagaccaagccaggtcggcgaaaaggagcctgaccttcccgtctgtctccatcgggaagtacatcttctccagcgagaagctgcgccacgtcaacatgcgctcctgcaacgatcgaagcggagaccgggttgtggcctacatctgcgaccagtattgtgcagaagtgcactggtcgaaagtgacaggcacaaagcgctacaagatgaccgagcaagtccaaggtaatttttggagcgcaacaagatgaccgagcaagtccaaggtaatttttggagcgctacaagatgaccgagcaagtccaggtgatttttggccagtttagtaaaatattttaattatcataaaatattaacaaaacttttgaaactgatttatttgtatcataagtgccccacaattataattgtatagtactttatagtatgacactacaaataatctttcaaaataagtatacaaagtactggtgtcacgagtccataagctgtaacatctagaggattcgatatgcaacgtcgaagaacttgatgcatttgatttgatcggtttttacctcactatccagttattgtaggctactgtaagcgtattaatgcgcagatctatctatcgtcttcttatgacctttaagataccacatgacgagcaattgaaaactgagtgcgattcgtattatgataagaacaaatgcactgttgaaatatgcttggctcggtaaatgtattttcatctcaacgatttaccagaattactttcagtatttagggataatctgttaaggtttttgaagtgctttcggctagtgggctatataccagcgccgctttgtagcgatgggacagccaatacgcaaaaagtaccatttgattttcggccaatgccatgtctctcacgggacgtacgttcgtcacaagtcacacacttcttcaacatgaccgcttgtgatggtgcgctagcgcgttggccggtatgcatgtgccttgcatacttcgataaaaagaaaatacactcaaattctcgatcagatttacgttcatttcagaattttcctcgatcgtgcaaggcggtcatgcagcgctcaagcgacgccacagcagcagaccaagccaggtcggcgaaaaggagcctgaccttcccgtctgtctccatcgggaagtacatcttctccagcgagaagctgcgccacgtcaacatgcgctcctgcaacgatcgaagcggaaaccgggttgtggcctacatctgcgaccagtattgtgcagaagtgcactggtcgaaagtgacaggcacaaagcgctacaagatgaccgagcaagtccaaggtaatttttggagcgctacaagatgaccgagcaagtccaaggtaatttttggagcgctacaagatgaccgagcaagtccaggtgatttttggccagtttagtaaaatattttaattatcataaaatattaacaaaacttttgaaactgatttatttgtatcataagtgccccacaattataattgtatagtactttatagtatgacactacaaataatctttcaaaataagtatacaaagtactggtgtcacgagtccataagctgtaacatctagaggattcgatatgcaacgtcgaagaacttgatgcatttgatttgatcggtttttacctcactatccagttattgtaggctactgtaagcgtattaatgcgcagatctatctatcgtcttcttatgacctttaagataccacatgacgagcaattgaaaactgagtgcgattcgtattatgataagaacaaatgcactgttgaaatatgcttggctcggtaaatgtattttcatctcaacgatttaccagtattactttcagtatttagggataatctgttaaggtttttgaagtgctttcggctagtgggctatataccagcgccgctttgtagcgatgggacagccaatacgcaaaaagtaccatttgattttcggccaatgccatgtctctcacgggacgtacgttcgtcacaagtcacacacttcttcaacatgaccgcttgtgatggtgcgctagcgcgttggccggtatgcatgtgccttgcatacttcgataaaaagaaaatacactcaaattctcgatcagatttacgttcatttcagaattttcctcgatcgtgcaaggcggtcatgcagcgctcaagcgacgccacagcagcagaccaagccaggtcggcgaaaaggagcctgaccttcccgtctgtctccatcgggaagtacatcttctccagcgagaagctgcgccacgtcaacatgcgctcctgcaacgatcgaagcggagaccgggttgtggcctacatctgcgaccagtattgtgcagaagtgcactggtcgaaagtgacaggcacaaagcgctacaagatgaccgagcaagtccaaggtaatttttggagcgctacaagatgaccgagcaagtccaggtgatttttggccagtttagtaaaatattttaattatcataaaatattaacaaaacttttgaaactgatttatttgtatcataagtgccccacaattataattgtatagtactttatagtatgacactacaaataatctttcaaaataagtatacaaagtactggtgtcacgagtccataagctgtaacatctagaggattcgatatgcaacgtcgaagaacttgatgcatttgatttgatcggtttttacctcactatccagttattgtaggctactgtaagcgtattaatgcgcagatctatctatcgtcttcttatgacctttaagataccacacgacgagcaattgaaaactgagtgcgattcgtattatgataagaacaaatgcactgttgaaatatgcttggctcggtaaatgtattttcatctcaacgatttaccagaattactttcagtatttagggataatctgttaaggtttttgaagtgctttcggctagtgggctatataccagcgccgctttgtagcgatgggacagccaatacgcaaaaagtaccatttgattttcggccaatgccatgtctctcacgggacgtacgttcgtcacaagtcacacacttcttcaacatgaccgcttgtgatggtgcgctagcgcgttggccggtatgcatgtgccttgcatacttcgataaaaagaaaatacactcaaattctcgatcagatttacgttcatttcagaattttcctcgatcgtgcaaggcggtcatgcagcgctcaagcgacgccacagcagcagaccaagccaggtcggcgaaaaggagcctgaccttcccgtctgtctccatcgggaagtacatcttctccagcgagaagctgcgccacgtcaacatgcgctcctgcaacgatcgaagcggagaccgggttgtggcctacatctgcgaccagtattgtgcagaagtgcactggtcgaaagtgacaggcacaaagcgctacaagatgaccgagcaagtccaaggtaatttttggagcgctacaagatgaccgagcaagtccaggtgatttttggccagtttagtaaaatattttaattatcataaaatattaacaaaacttttgaaactgatttatttgtatcataagtgccccacaattataattgtatagtgcaaggcgatcatgcagcgctcaagcgacgccacagcagcagaccaagccaggtcggcgaaaaggagcctgaccttcccgtctgtctccatcgggaagtacatcttctccagcgagaagctgcgccacgtcaacatgcgctcctgcaacgatcgaagcggagaccgggttgtggcctacatctgcgaccagtattgtgcagaagtgcactggtcgaaagtgacaggcacaaagcgctacaagatgaccgagcaagtccaaggtaatttttggagcgctacaagatgaccgagcaagtccaggtgatttttggccagtttagtaaaatattttaattatcataaaatattaacaaaacttttgaaactgatttatttgtatcataagtgccccacaattataattgtatagtactttatagtatgacactacaaataatctttcaaaataagtatacaaagtactggtgtcacgagtccataagctgtaacatctagaggattcgatatgcaacgtcgaagaacttgatgcatttgatttgatcggtttttacctcactatccagttattgtaggcgtattaatgcgcagatctatctatcgtcttcttatgacctttaagataccacatgacgagcaattgaaaactgagtgcgattcgtattatgataagaacaaatgcactgttgaaatatgcttggctcggtaaatgtattttcatctcaacgatttaccagaattactttcagtatttagggataatctgttaaggtttttgaagtgctttcggctagtgggctatataccagcgccgctttgtagcgatgggacagccaatacgcaaaaagtaccatttgattttcggccaatgccatgtctctcacgggacgtacgttcgtcacaagtcacacacttcttcaacatgaccgcttgtgatggtgcgctagcgcgttggccggtatgcatgtgccttgcatacttcgataaaaagaaaatacactcaaattctcgatcagatttacgttcatttcagaattttcctcgatcgtgcaaggcggtcatgcagcgctcaagggacgccacagcagcagaccaagccaggtcggcgaaaaggagcctgaccttcccgtctgtctccatccggaagtacatcttctccagcgagaagctgcgccacgtcaacatgcgctcctgcaacgatcgaagcggagaccgggttgtggcctacatctgcgaccagtattgtgcagaagtgcactggtcgaaagtgacaggcacaaagcgctacaagatgaccgagcaagtccaaggtaatttttggagcgctacaagatgaccgagcaagtccaggtgatttttggccagtttagtaaaatattttaattatcataaaatattaacaaaacttttgaaactgatttatttgtatcataagtgccccacaattataattgtatagtactttatagtatgacactacaaataatctttcaaaataagtatacaaagtactggtgtcacgagtccataagctgtaacatctagaggattcgatatgcaacgtcgaagaacttgatgcatttgatttgatcggtttttacctcactatccagttattgtaggctactgtaagcgtattaatgcgcagatctatctatcgtcttcttatgacctttaagataccacatgacgagcaattgaaaactgagtgcgattcgtattatgataagaacaaatgcactgttgaaatatgcttggctcggtaaatgtattttcatctcaacgatttaccagaattactttcagtatttagggataatctgttaaggtttttgaagtgctttcggctagtgggctatataccagcgccgctttgtagcgatgggacagccaatacgcaaaaagtaccatttgattttcggccaatgccatgtctctcacgggacgtacgttcgtcacaagtcacacacttcttcaacatgaccgcttgtgatggtgcgctagcgcgttggccggtatgcatgtgccttgcatacttcgataaaaagaaaatacactcaaattctcgatcagatttacgttcatttcagaattttcctcgatcgtgcaaggcggtcatgcagcactcaagcgacgccacagcagcagaccaagccaggtcggcgaaaaggagcctgaccttcccgtctgtctccatcgggaagtacatcttctccagcgagaagctgcgccacgtcaacatgcgctcctgcaacgatcgaagcggagaccgggttgtggcctacatctgcgaccagtattgtgcagaagtgcactggtcgaaagtgacaggcacaaagcgctacaagatgaccgagcaagtccaaggtaatttttggagcgctacaagatgaccgagcaagtccaggtgatttttggccagtttagtaaaatattttaattatcataaaatattaacaaaacttttgaaactgatttatttgtatcataagtaccccacaattataattgtatagtactttatagtatgacactacaaataatctttcaaaataagtatacaaagtactggtgtcacgagtccataagctgtaacatctagaggattcgatatgcaacgtcgaagaacttgatgcatttgatttgatcggtttttacctcactatccagttattgtaggctactgtaagcgtattaatgcgcagatctatctatcgtcttcttatgacctttaagataccacatgacgagcaattgaaaactgagtgcgattcgtattatgataagaacaaatgcactgttgaaatatgcttggctcggtaaatgtattttcatctcaacgatttaccagaattactttcagtatttagggataatctgttaaggtttttgaagtgctttcggctagtgggctatataccagcgccgctttgtagcgatgggacagccaatacgcaaaaagtaccatttgattttcggccaatgccatgtctctcaagggacgtacgttcgtcacaagtcacacacttcttcaacatgaccgcttgtgatggtgcgctagcgcgttggccggtatgcatgtgccttgcatacttcgataaaaagaaaatacactcaaattctcgatcagatttacgttcatttcagaattttcctcgatcgtgcaaggcggtcatgcagcgctcaagcgacgccacagcagcagaccaagccaggtcggcgaaaaggagcctgaccttcccgtctgtctccatcgggaagtacatcttctccagcgagaagctgcgccacgtcaacatgcgctcctgcaacgatcgaagcggagaccgggttgtggcctacatctgcgaccagtattgtgcagaagtgcactggtcgaaagtgacaggcacaaagcgctacaagatgaccgagcaagtccaaggtaatttttggagcgctacaagatgaccgagcaagtccaggtgatttttggccagtttagtaaaatattttaattatcataaaatattaacaaaacttttgaaactgatttatttgtatcataagtgccccacaattataattgtatagtactttatagtatgacactacaaataatctttcaaaataagtatacaaagtactggtgtcacgagtccataagctgtaacatctagaggattcgatatgcaacgtcgaagaacttgatgcatttgatttgatcggtttttacctcactatccagttattgtaggctactgtaagcgtattaatgcgcagatctatctatcgtcttcttatgacctttaagataccacatgacgagcaattgaaaactgagtgcgattcgtattatgataagaacaaatgcactgttgaaatatgcttggctcggtaaatgtattttcatctcaacgatttaccagaattactttcagtatttagggataatctgttaaggtttttgaagtgctttcggctagtgggctatataccagcgccgctttgtagcgatgggacagccaatacgcaaaaagtaccatttgattttcggccaatgccatgtctctcacgggacgtacgttcgtcacaagtcacacacttctccaacatgaccgcttgtgatggtgcgctagcgcgttggccggtatgcatgtgccttgcatacttcgataaaaagaaaatacactcaaattctcgatcagatttacgttcatttcagaattttcctcgatcgtgcaaggcggtcatgcagcgctcaagcgacgccacagcagcagaccaagccaggtcggcgaaaaggagcctgaccttcccgtctgtctccatcgggaagtacatcttctccagcgagaagctgcgccacgtcaacatgcgctcctgcaacgatcgaagcggagaccgggttgtggcctacatctgcgaccagtattgtgcagaagtgcactggtcgaaagtgacaggcacaaagcgctacaagatgaccgagcaagtccaaggtaatttttggagcgctacaagatgaccgagcaagtccaggtgatttttggccagtttagtaaaatattttaattatcataaaatattaaggctagtgggctatataccagcgccgctttgtagcgatgggacagccaatacgcaaaaagtaccatttgattttcggccaatgccatgtctctcaagggacgtacgttcgtcacaagtcacacacttcttcaacatgaccgcttgtgatggtgcgctagcgcgttggccggtatgcatgtgccttgcatacttcgataaaaagaaaatacactcaaattctcgatcagatttacgttcatttcagaattttcctcgatcgtgcaaggcggtcatgcagcgctcaagcgacgccacagcagcagaccaagccaggtcggcgaaaaggagcctgaccttcccgtctgtctccatcgggaagtacatcttctccagcgagaagctgcgccacgtcaacatgcgctcctgcaacgatcgaagcggagaccgggttgtggcctacatctgcgaccagtattgtgcagaagtgcactggtcgaaagtgacaggcacaaagcgctacaagatgaccgagcaagtccaaggtaatttttggagcgcaacaagatgaccgagcaagtccaaggtaatttttggagcgctacaagatgaccgagcaagtccaggtgatttttggccagtttagtaaaatattttaattatcataaaatattaacaaaacttttgaaactgatttatttgtatcataagtgccccacaattataattgtatagtactttatagtatgacactacaaataatctttcaaaataagtatacaaagtactggtgtcacgagtccataagctgtaacatctagaggattcgatatgcaacgtcgaagaacttgatgcatttgatttgatcggtttttacctcactatccagttattgtaggctactgtaagcgtattaatgcgcagatctatctatcgtcttcttatgacctttaagataccacatgacgagcaattgaaaactgagtgcgattcgtattatgataagaacaaatgcactgttgaaatatgcttggctcggtaaatgtattttcatctcaacgatttaccagaattactttcagtatttagggataatctgttaaggtttttgaagtgctttcggctagtgggctatataccagcgccgctttgtagcgatgggacagccaatacgcaaaaagtaccatttgattttcggccaatgccatgtctctcaagggacgtacgttcgtcacaagtcacacacttcttcaacatgaccgcttgtgatggtgcgctagcgcgttggccggtatgcatgtgccttgcatacttcgataaaaagaaaatacactcaaattctcgatcagatttacgttcatttcagaattttcctcgatcgtgcaaggcgatcatgcagcgctcaagcgacgccacagcagcagaccaagccaggtcggcgaaaaggagcctgaccttcccgtctgtctccatcgggaagtacatcttctccagcgagaagctgcgccacgtcaacatgcgctcctgcaacgatcgaagcggagaccgggttgtggcctacatctgcgaccagtattgtgcagaagtgcactggtcgaaagtgacaggcacaaagcgctacaagatgaccgagcaagtccaaggtaatttttggagcgctacaagatgaccgagcaagtccaaggtaatttttggagcgctacaagatgaccgagcaagtccaggtgatttttggccagtttagtaaaatattttaattatcataaaatattaacaaaacttttgaaactgatttatttgtatcataagtgccccacaattataattgtatagtactttatagtatgacactacaaataatctttcaaaataagtatacaaagtactggtgtcacgagtccataagctgtaacatctagaggattcgatatgcaacgtcgaagaacttgatgcatttgatttgatcggtttttacctcactatccagttattgtaggctactgtaagcgtattaatgcgcagatctatctatcgtcttcttatgacctttaagataccacatgacgagcaattgaaaactgagtgcgattcgtattatgataagaacaaatgcactgttgaaatatgcttggctcggtaaatgtattttcatctcaacgatttaccagaattactttcagtatttagggataatctgttaaggtttttgaagtgctttcggctagtgggctatataccagcgccgctttgtagcgatgggacagccaatacgcaaaaagtaccatttgattttcggccaatgccatgtctctcaagggacgtacgttcgtcacaagtcacacacttcttcaacatgaccgcttgtgatggtgcgctagcgcgttggccggtatgcatgtgccttgcatacttcgataaaaagaaaatacactcaaattctcgatcagatttacgttcatttcagaattttcctcgatcgtgcaaggcgatcatgcagcgctcaagcgacgccacagcagcagaccaagccaggtcggcgaaaaggagcctgaccttcccgtctgtctccatcgggaagtacatcttctccagcgagaagctgcgccacgtcaacatgcgctcctgcaacgatcgaagcggagaccgggttgtggcctacatctgcgaccagtattgtgcagaagtgcactggtcgaaagtgacaggcacaaagcgctacaagatgaccgagcaagtccaaggtaatttttggagcgctacaagatgaccgagcaagtccaggtgatttttggccagtttagtaaaatattttaattatcataaaatattaacaaaacttttgaaactgatttatttgtatcataagtgccccacaattataattgtatagtactttatagtatgacactacaaataatctttcaaaataagtatacaaagtactggtgtcacgagtccataagctgtaacatctagaggattcgatatgcaacgtcgaagaacttgatgcatttgatttgatcggtttttacctcactatccagttattgtaggctactgtaagcgtattaatgcgcagatctatctatcgtcttcttatgacctttaagataccacatgacgagcaattgaaaactgagtgcgattcgtattatgataagaacaaatgtactgttgaaatatgcttggctcggtaaatgtattttcatctcaacgatttaccagaattactttcagtatttagggataatctgttaaggtttttgaagtgctttcggctagtgggctatataccagcgccgctttgtagcgatgggacagccaatacgcaaaaagtaccatttgattttcggccaatgccatgtctctcatgggacgtacgttcgtcacaagtcacacacttcttcaacatgaccgcttgtgatggtgcgctagcgcgttggccggtatgcatgtgccttgcatacttcgataaaaagaaaatacactcaaattctcgatcagatttacgttcatttcagaattttcctcgatcgtgcaaggcgatcatgcagcgctcaagcgacgccacagcagcagaccaagccaggtcggcgaaaaggagcctgaccttcccgtctgtctccatcgggaagtacatcttctccagcgagaagctgcgccacatcaacatgcgctcctgcaacgatcgaagcggagaccgggttgtggcctacatctgcgaccagtattgtgcagaagtgcactggtcgaaagtgacaggcacaaagcgctacaagatgaccgagcaagtccaaggtaatttttggagcgctacaagatgaccgagcaagtccaggtgatttttggccagtttagtaaaatattttaattatcataaaatattaacaaaacttttgaaactgatttatttgtatcataagtgccccacaattataattgtatagtactttatagtatgacactacaaataatctttcaaaataagtatacaaagtactggtgtcacgagtccataagctgtaacatctagaggattcgatatgcaacgtcgaagaacttgatgcatttgatttgatcggtttttacctcactatccagttattgtaggctactgtaagcgtattaatgcgcagatctatctatcgtcttcttatgacctttaagataccacatgacgagcaattgaaaactgagtgcgattcgtattatgataagaacaaatgtactgttgaaatatgcttggctcggtaaatgtattttcatctcaacgatttaccagaattactttcagtatttagggataatctgttaaggtttttgaagtgctttcggctagtgggctatataccagcgccgctttgtagcgatgggacagccaatacgcaaaaagtaccatttgattttcggccaatgccatgtctctcatgggacgtacgttcgtcacaagtcacacacttcttcaacatgaccgcttgtgatggtgcgctagcgcgttggccggtatgcatgtgccttgcatacttcgataaaaagaaaatacactcaaattctcgatcagatttacgttcatttcagaattttcctcgatcgtgcaaggcggtcatgcagcgctcaagcgacgccacagcagcagaccaagccaggtcggcgaaaaggagcctgaccttcccgtctgtctccatcgggaagtacatcttctccagcgagaagctgcgccacgtcaacatgcgctcctgcaacgatcgaagcggagaccgggttgtggcctacatctgcgaccagtattgtgcagaagtgcactggtcgaaagtgacaggcacaaagcgctacaagatgaccgagcaagtccaaggtaattttctgaaatgaacgtaaatctgatcgagaatttgagtgtattttctttttatcgaagtatgcaaggcacatgcataccggccaacgcgctagcgcaccatcacaagcggtcatgttgaagaagtgtgtgacttgtgacgaacgtacgtcccatgagagacatggcattggccgaaaatcaaatggtactttttgcgtattggctgtcccatcgctacaaagcggcgctggtatatagcccactagccgaaagcacttcaaaaaccttaacagattatccctaaatactgaaagtaattctggtaaatcgttgagatgaaaatacatttaccgagccaagcatatttcaacagtgcatttgttcttatcataatacgaatcgcactcagttttcaattgctcgtcatgtggtatcttaaaggtcataagaagacgatagatagatctgcgcattaatacgcttacagtagcctacaataactggatagtgaggtaaaaaccgatcaaatcaaatgcatcaagttcttcgacgttgcatatcgaatcctctagatgttacagcttatggactcgtgacaccagtactttgtatacttattttgaaagattatttgtagtgtcatactataaagtactatacaattataattgtggggcacttatgatacaaataaatcagtttcaaaagttttgttaatattttatgataattaaaatattttactaaactggccaaaaatcacctggacttgctcggtcatcttgtagcgctttgtgcctgtcactttcgaccagtgcacttctgcacaatactggtcgcagatgtaggccacaacccggtctccgcttcgatcgttgcaggagcgcatgttgatgtggcgcagcttctcgctggagaagatgtacttcccgatggagacagacgggaaggtcaggctccttttcgccgacctggcttggtctgctgctgtggcgtcgcttgagcgctgcatgaccgccttgcacgatcgaggaaaattccagcttatggactcgtgacaccagtactttgtatacttattttgaaagattatttgtagtgtcatactataaagtactatacaattataattgtggggcacttatgatacaaataaatcagtttcaaaagttttgttaatattttatgataattaaaatattttactaaactggccaaaaatcacctggacttgctcggtcatcttgtagcgctccaaaaattaccttggacttgctcggtcatcttgtagcgctccaaaaattaccttggacttgctcggtcatcttgtagcgctttgtgcctgtcactttcgaccagtgcacttctgcacaatactggtcgcagatgtaggccacaacccggtctccgcttcgatcgttgcaggagcgcatgttgacgtggcgcagcttctcgctggagaagatgtacttcccgatggagacagacgggaaggtcaggctccttttcgccgacctggcttggtctgctgctgtggcgtcgcttgagcgctgcatgatcgccttgcacgatcgaggaaaattctgaaatgaacgtaaatctgatcgagaatttgagtgtattttctttttatcgaagtatgcaaggcacatgcataccggccaacgcgctagcgcaccatcacaagcggtcatgttgaagaagtgtgtgacttgtgacgaacgtacgtcccgtgagagacatggcattggccgaaaatcaaatggtactttttgcgtattggctgtcccatcgctacaaagcggcgctggtatatagcccactagccgaaagcacttcaaaaaccttaacagattatccctaaatactgaaagtaattctggtaaatcgttgagatgaaaatacatttaccgagccaagcatatttcaacagtgcatttgttcttatcataatacgaatcgcactcagttttcaattgctcgtcatgtggtatcttaaaggtcataagaagacgatagatagatctgcgcattaatacgcttacagtagcctacaataactggatagtgaggtaaaaaccgatcaaatcaaatgcatcaagttcttcgacgttgcatatcgaatcctctagatgttacagcttatggactcgtgacaccagtactttgtatacttattttgaaagattatttgtagtgtcatactataaagtactatacaattataattgtggggcacttatgatacaaataaatcagtttcaaaagttttgttaatattttatgataattaaaatattttactaaactggccaaaaatcacctggacttgctcggtcatcttgtagcgctccaaaaattaccttggacttgctcggtcatcttgtagcgctttgtgcctgtcactttcgaccagtgcacttctgcacaatactggtcgcagatgtaggccacaacccggtctccgcttcgatcgttgcaggagcgcatgttgatgtggcgcagcttctcgctggagaagatgtacttcccgatggagacagacgggaaggtcaggctccttttcgccgacctggcttggtctgctgctgtggcgtcgcttgagcgctgcatgaccgccttgcacgatcgaggaaaattctgaaatgaacgtaaatctgatcgagaatttgagtgtattttctttttatcgaagtatgcaaggcacatgcataccggccaacgcgctagcgcaccatcacaagcggtcatgttgaagaagtgtgtgacttgtgacgaacgtacgtcccgtgagagacatggcattggccgaaaatcaaatggtactttttgcgtattggctgtcccatcgctacaaagcggcgctggtatatagctcactagccgaaagcacttcaaaaaccttaacagattatccctaaatactgaaagtaattctggtaaatcgttgagatgaaaatacatttaccgagccaagcatatttcaacagtgcatttgttcttatcataatacgaatcgcactcagttttcaattgctcgtcatgtggtatcttaaaggtcataagaagacgatagatagatctgcgcattaatacgcttacagtagcctacaataactggatagtgaggtaaaaaccgatcaaatcaaatgcatcaagttcttcgacgttgcatatcgaatcctctagatgttacagcttatggactcgtgacaccagtactttgtatacttattttgaaagattatttgtagtgtcatactataaagtactatacaattataattgtggggcacttatgatacaaataaatcagtttcaaaagttttgttaatattttatgataattaaaatattttactaaactggccaaaaatcacctggacttgctcggtcatcttgtagcgctccaaaaattaccttggacttgctcggtcatcttgtagcgctttgtgcctgtcactttcgaccagtgcacttctgcacaatactggtcgcagatgtaggccacaacccggtttccgcttcgatcgttgcaggagcgcatgttgatgtggcgcagcttctcgctggagaagatgtacttcccgatggagacagacgggaaggtcaggctccttttcgccgacctggcttggtctgctgctgtggcgtcgcttgagtgctgcatgaccgccttgcacgatcgaggaaaattctgaaatgaacgtaaatctgatcgagaatttgagtgtattttctttttatcgaagtatgcaaggcacatgcataccggccaacgcgctagcgcaccatcacaagcggtcatgttgaagaagtgtgtgacttgtgacgaacgtacgtcccgtgagagacatggcattggccgaaaatcaaatggtactttttgcgtattggctgtcccatcgctacaaagcggcgctggtatatagcccactagccgaaagcacttcaaaaaccttaacagattatccctaaatactgaaagtaattctggtaaatcgttgagatgaaaatacatttaccgagccaagcatatttcaacagtgcatttgttcttatcataatacgaatcgcactcagttttcaattgctcgtcatgtggtatcttaaaggtcataagaagacgatagatagatctgcgcattaatacgcttacagtagcctacaataactggatagtgaggtaaaaaccgatcaaatcaaatgcatcaagttcttcgacgttgcatatcgaatcctctagatgttacagcttatggactcgtgacaccagtactttgtatacttattttgaaagattatttgtagtgtcatactataaagtactatacaattataattgtggggcacttatgatacaaataaatcagtttcaaaagttttgttaatattttatgataattaaaatattttacttaactggccaaaaatcacctggacttgctcggtcatcttgtagcgctttgtgcctgtcactttcgaccagtgcacttctgcacaatactggtcgcagatgtaggccacaacccggtctccgcttcgatcgttgcaggagcgcatgttgacgtggcgcagcttctcgctggagaagatgtacttcccgatggagacagacgggaaggtcaggctccttttcgccgacctggcttggtctgctgctgtggcgtcgcttgagcgctgcatgaccgccttgcacgatcgaggaaaattctgaaatgaacgtaaatctgatcgagaatttgagtgtattttctttttatcgaagtatgcaaggcacatgcataccggccaacgcgctagcgcaccatcacaagcggtcatgttggagaagtgtgtgacttgtgacgaacgtacgtcccgtgagagacatggcattggccgaaaatcaaatggtactttttgcgtattggctgtcccatcgctacaaagcggcgctggtatatagcccactagccgaaagcacttcaaaaaccttaacagattatccctaaatactgaaagtaattctggtaaatcgttgagatgaaaatacatttaccgagccaagcatatttcaacagtgcatttgttcttatcataatacgaatcgcactcagttttcaattgctcgtcatgtggtatcttaaaggtcataagaagacgatagatagatctgcgcattaatacgcttacagtagcctacaataactggatagtgaggtaaaaaccgatcaaatcaaatgcatcaagttcttcgacgttgcatatcgaatcctctagatgttacagcttatggactcgtgacaccagtactttgtatacttattttgaaagattatttgtagtgtcatactataaagtactatacaattataattgtggggcacttatgatacaaataaatcagtttcaaaagttttgttaatattttatgataattaaaatattttactaaactggccaaaaatcacctggacttgctcggtcatcttgtagcgctttgtgcctgtcactttcgaccagtgcacttctgcacaatactggtcgcagatgtaggccacaacccggtctccgcttcgatcgttgcaggagcgcatgttgacgtggcgcagcttctcgctggagaagatgtacttcccgatggagacagacgggaaggtcaggctccttttcgccgacctggcttggtctgctgctgtggcgtcgcttgagcgctgcatgatcgccttgcacgatcgaggaaaattctgaaatgaacgtaaatctgatcgagaatttgagtgtattttctttttatcgaagtatgcaaggcacatgcataccggccaacgcgctagcgcaccatcacaagcggtcatgttgaagaagtgtgtgaattctgaaatgaacgtaaatctgatcgagaatttgagtgtattttctttttatcgaagtatgcaaggcacatgcataccggccaacgcgctagcgcaccatcacaagcggtcatgttgaagaagtgtgtgacttgtgacgaacgtacgtcccgtgagagacatggcattggccgaaaatcaaatggtactttttgcgtattggctgtcccatcgctacaaagcggcgctggtatatagcccactagccgaaagcacttcaaaaaccttaacagattatccctaaatactgaaagtaattctggtaaatcgttgagatgaaaatacatttaccgagccaagcatatttcaacagtgcatttgttcttatcataatacgaattgcactcagttttcaattgctcgtcatgtggtatcttaaaggtcataagaagacgatagatagatctgcgcattaatacgcttacagtagcctacaataactggatagtgaggtaaaaaccgatcaaatcaaatgcatcaagttcttcgacgttgcatatcgaatcctctagatgttacagcttatggactcgtgacaccagtactttgtatacttattttgaaagattatttgtagtgtcatactataaagtactatacaattataattgtggggcacttatgatacaaataaatcagtttcaaaagttttgttaatattttatgataattaaaatattttactaaactggccaaaaatcacctggacttgctcggtcatcttgtagcgctttgtgcctgtcactttcgaccagtgcacttctgcacaatactggtcgcagatgtaggccacaacccggtctccgcttcgatcgttgcaggagcgcatgttgacgtggcgcagcttctcgctggagaagatgtacttcccgatggagacagacgggaaggtcaggctccttttcgccgacctggcttggtctgctgctgtggcgtcgcttgagcgctgcatgaccgccttgcacgatcgaggaaaattctgaaatgaacgtaaatctgatcgagaatttgagtgtattttctttttatcgaagtatgcaaggcacatgcataccggccaacgcgctagcgcaccatcacaagcggtcatgttgaagaagtgtgtgacttgtgacgaacgtacgtcccgtgagagacatggcattggccgaaaatcaaatggtactttttgcgtattggctgtcccatcgctacaaagcggcgctggtatatagcccactagccgaaagcacttcaaaaaccttaacagattatccctaaatactgaaagtaattctggtaaatcgttgagatgaaaatacatttaccgagccaagcatatttcaacagtgcatttgttcttatcataatacgaatcgcactcagttttcaattgctcgtcatgtggtatcttaaaggtcataagaagacgatagatagatctgcgcattaatacgcttacagtagcctacaataactggatagtgaggtaaaaaccgatcaaatcaaatgcatcaagttcttcgacgttgcatatcgaatcctctagatgttacagcttatggactcgtgacaccagtactttgtatacttattttgaaagattatttgtagtgtcatactataaagtactatacaattataattgtggggcacttatgatacaaataaatcagtttcaaaagttttgttaatattttatgataattaaaatattttactaaactggccaaaaatcacctggacttgctcggtcatcttgtagcgctttgtgcctgtcactttcgaccagtgcacttctgcacaatactggtcgcagatgtaggccacaacccggtctccgcttcgatcgttgcaggagcgcatgttgacgtggcgcagcttctcgctggagaagatgtacttcccgatggagacagacgggaaggtcaggctccttttcgccgacctggcttggtctgctgctgtggcgtcgcttgagcgctgcatgaccgccttgcacgatcgaggaaaattctgaaatgaacgtaaatctgatcgagaatttgagtgtattttctttttatcgaagtatgcaaggcacatgcataccggccaacgcgctagcgcaccatcacaagcggtcatgttgaagaagtgtgtgacttgtgacgaacgtacgtcccatgagagacatggcattggccgaaaatcaaatggtactttttgcgtattggctgtcccatcgctacaaagcggcgctggtatatagcccactagccgaaagcacttcaaaaaccttaacagattatccctaaatactgaaagtaattctggtaaatcgttgagatgaaaatacatttaccgagccaagcatatttcaacagtacatttgttcttatcataatacgaatcgcactcagttttcaattgctcgtcatgtggtatcttaaaggtcataagaagacgatagatagatctgcgcattaatacgggtcgtaggctgcggcgtcacaggctcagccgtggtcggctcgggcgtgacgggctccgcggtcgtaggctgcggcgtcacgggctcagccgtggtcggctcgggcgtgacgggctcagccgtggtcgggtcgggcgtgacgggctcaggagtcgtaggctgcggcgtcacgggctcagccgtggtcggctcgggcgtgacgggctccgcggtcgtaggctgcggcgtcacagggtcagccgtggtcggctcgggcgtgacgggctcagaagtcgtaggctgcggcgtcacgggctcagccgtggtcggctcgggcgtgacgggctccgcggtcgtaggctgcggcgtcacaggctcagccgtggtcgggtcgggcgtcacgggctccgcagtcgtaggctgcggcgtcacgggctcagccgtggtcggctcgggcgtgacgggctccgcggtcgtaggctgcggcgtcacaggctcaggagtcgtaggctgcggcgtcacgggctcagccgtggtcggctcgggcgtgacgggctcagccgtggtcggctcgggcgtgacgggctccgcggtcgtaggctgcggcgtcacaggctcagccgtggtcggctcgggcgtgacgggctcagccgtcgtcggctcgggcgtgacgggctccgcggtcgtaggctgcggcgtcacgggctcagctgtggtcggctcgggcgtgacgggctcagccgtggtcgggtcgggcgtgacgggctcagccgtcgtcggctcgggcgtgacgggctccgcggtcgtaggctgcggcgtcacgggctcagctgtggtcggctcgggcgtgacgggctccgcggtcgtaggctgcggcgtcacgggctcagccgtggtcggctcgggcgtgacgggctccgcggtcgtaggctgcggcgtcacaggctcagccgtggtcggctcgggcgtgacgggctcaggagtcgtaggctgcggcgtcacgggctcagccgtggtcggctcgggcgtgacgggctcagccgtggtcgggtccgcttgtgatggtgcgctagcgcgttggccggtatgcatgtgccttgcatacgtcgataaaaagaaaatacactcaaattctcgatcagatttacgttcatttcagaattttcctcgatcgtgcaaggcggtcatgcagcgctcaagcgacgccacagcagcagaccaagccaggtcggcgaaaaggagcctgaccttcccgtctgtctccatcgggaagtacatcttctccagcgagaagctgcgccacgtcaacatgcgctcctgcaacgatcgaagcggagaccgggttgtggcctacatctgcgaccagtattgtgcagaagtgcactggtcgaaagtgacaggcacaaagcgctacaagatgaccgagcaagtccaaggtaatttttggagcgctacaagatgaccgagcaagtccaggtgatttttggccagtttagtaaaatattttaattatcataaaatattaacaaaacttttgaaactgatttatttgtatcataagtgccccacaattataattgtatagtactttatagtatgacactacaaataatctttcaaaataagtatacaaagtactggtgtcacgagtccataagctgtaacatctagaggattcgatatgcaacgtcgaagaacttgatgcatttgatttgatcggtttttacctcactatccagttattgtaggctactgtaagcgtattaatgcgcagatctatctatcgtcttcttatgacctttaagataccacatgacgagcaattgaaaactgagtgcgattcgtattatgataagaacaaatgcactgttgaaatatgcttggctcggtaaatgtattttcatctcaacgatttaccagaattactttcagtatttagggataatctgttaaggtttttgaagtgctttcggctagtgagctatataccagcgccgctttgtagcgatgggacagccaatacgcaaaaagtaccatttgattttcggccaatgccatgtctctcacgggacgtacgttcgtcacaagtcacacacttcttcaacatgaccgcttgtgatggtgcgctagcgcgttggccggtatgcatgtgccttgcatacttcgataaaaagaaaatacactcaaattctcgatcagatttacgttcatttcagaattttcctcgatcgtgcaaggcgatcatgcagcgctcaagcgacgccacagcagcagaccaagccaggtcggcgaaaaggagcctgaccttcccgtctgtctccatcgggaagtacatcttctccagcgagaagctgcgccacgtcaacatgcgctcctgcaacgatcgaagcggagaccgggttgtggcctacatctgcgaccagtattgtgcagaagtgcactggtcgaaagtgacaggcacaaagcgctacaagatgaccgagcaagtccaaggtaatttttggagcgctacaagatgaccgagcaagtccaggtgatttttggccagtttagtaaaatattttaattatcataaaatattaacaaaacttttgaaactgatttatttgtatcataagtgccccacaattataattgtatagtactttatagtatgacactacaaataatctttcaaaataagtatacaaagtactggtgtcacgagtccataagctgtaacatctagaggattcgatatgcaacgtcgaagaacttgatgcatttgatttgatcggtttttacctcactatccagttattgtaggctactgtaagcgtattaatgcgcagatctatctatcgtcttcttatgacctttaagataccacatgacgagcaattgaaaactgagtgcgattcgtattatgataagaacaaatgcactgttgaaatatgcttggctcggtaaatgtattttcatctcaacgatttaccagaattactttcagtatttagggataatctgttaaggtttttgaagtgctttcggctagtgggctatataccagcgccgctttgtagcgatgggacagccaatacgcaaaaagtaccatttgattttcggccaatgccatgtctctcatgggacgtacgttcgtcacaagtcacacacttcttcaacatgaccgcttgtgatggtgcgctagcgcgttggccggtatgcatgtgccttgcatacttcgataaaaagaaaatacactcaaattctcgatcagatttacgttcatttcagaattttcctcgatcgtgcaaggcgatcatgcagcgctcaagcgacgccacagcagcagaccaagccaggtcggcgaaaaggagcctgaccttcccgtctgtctccatcgggaagtacatcttctccagcgagaagctgcgccacgtcaacatgcgctcctgcaacgatcgaagcggagaccgggttgtggcctacatctgcgaccagtattgtgcagaagtgcactggtcgaaagtgacaggcacaaagcgctacaagatgaccgagcaagtccaaggtaatttttggagcgctacaagatgaccgagcaagtccaggtgatttttggccagtttagtaaaatattttaattatcataaaatattaacaaaacttttgaaactgatttatttgtatcataagtgccccacaattataattgtatagtactttatagtatgacactacaaataatctttcaaaataagtatacaaagtactggtgtcacgagtccataagctgtaacatctagaggattcgatatgcaacgtcgaagaacttgatgcatttgatttgatcggtttttacctcactatccagttattgtaggctactgtaagcgtattaatgcgcagatctatctatcgtcttcttatgacctttaagataccacatgacgagcaattgaaaactgagtgcgattcgtattatgataagaacaaatgcactgttgaaatatgcttggctcggtaaatgtattttcatctcaacgatttaccagaattactttcagtatttagggataatctgttaaggtttttgaagtgctttcggctagtgggctatataccagcgccgctttgtagcgatgggacagccaatacgcaaaaagtaccatttgattttcggccaatgccatgtctctcaagggacgtacgttcgtcacaagtcacacacttcttcaacatgaccgcttgtgatggtgcgctagcgcgttggccggtatgcatgtgccttgcatacttcgataaaaagaaaatacactcaaattctcgatcagatttacgttcatttcagaattttcctcgatcgtgcaaggcggtcatgcagcgctcaagcgacgccacagcagcagaccaagccaggtcggcgaaaaggagcctgaccttcccgtctgtctccatcgggaagtacatcttctccagcgagaagctgcgccacgtcaacatgcgctcctgcaacgatcgaagcggagaccgggttgtggcctacatctgcgaccagtattgtgcagaagtgcactggtcgaaagtgacaggcacaaagcgctacaagatgaccgagcaagtccaaggtaatttttggagcgctacaagatgaccgagcaagtccaaggtaatttttggagcgctacaagatgaccgagcaagtccaggtgatttttggccagtttagtaaaatattttaattatcataaaatattaacaaaacttttgaaactgatttatttgtatcataagtgccccacaattataattgtatagtactttatagtatgacactacaaataatctttcaaaataagtatacaaagtactggtgtcacgagtccataagctgtaacatctagaggattcgatatgcaacgtcgaagaacttgatgcatttgatttgatcggtttttacctcactatccagttattgtaggctactgtaagcgtattaatgcgcagatctatctatcgtcttcttatgacctttaagataccacatgacgagcaattgaaaactgagtgcgattcgtattatgataagaacaaatgcactgttgaaatatgcttggctcggtaaatgtattttcatctcaacgatttaccagaattactttcagtatttagggataatctgttaaggtttttgaagtgctttcggctagtgggctatataccagcgccgctttgtagcgatgggacagccaatacgcaaaaagtaccatttgattttcggccaatgccatgtctctcaagggacgtacgttcgtcacaagtcacaatatgatacaggcggaaaacaacacactgaaagtcgagaaagagcagctcgcggtattgcttgttgaaaaatattgtacagtgtatttatttctaactgttgatatgatgccacaggaggaaattcacattctgagagccgagaatgaacatctcgcggtaatatttgctgaaaaaaattctacagcttctgtttactaactctagatatgatacaggagaaatatcgcgagctaagtgataagttcgagcagatcacgagcgctgaggtaatattgttgaacttcttgcagcttacgtattttacttaccgccagtatgatccaggcggagaaatgcaaccaggttgagcagctcgcaggctttcaggtaatttattcgttgaaaatctgtaccctttattttatttctaaccgtagatgtcttatacaggaggcaatgatatcccagaacgagcaattcgcggtactgattgttgaaaatgctctactttttctttttactaactgtatgatatgatacaggagcaaaatcgtgttctgaaagagcagctcgcagacgctcaggtactagatgttggaaaaattgtacggtttcatagtttactaaccgtaatatttgatatcagtacaacctgaacgagaaagtcaagcaagtcgcagaacttcaacacaaaacccaggaaattcgcaaatcgagtcacaacacgatccaggtaatgttttctgcaacctggatttatttattttacttaccgtaaaaatgttttcaggaacttcgagggaatgttcgggtcgtggttcgagcccggccagctcaaggttcaggtggcatcctgtcatttggaagcgacggggcccgtttgaccttgagcgagggcgatcagggccagtcgtacgagttcgaccgggtttttagcccttcatcgacccaagaccaagtgtttgaaggttgaagagcttgaagggctggtccaatccgccatcgacgggtataacgtcgccctcttcgcctatggacagacaggggctggaaaaacccacacggtaaatttgtatgcatgatttattatattgtcaccaaatgttctaaacccagtttgtgtatcaatgtagatgcttggatctgacaccggtcaacagcgcggggtaattccgcgtgcgctggagaagatttttcaagagacttcggttttgaccgaaactggctggacgttcaaggttcaagtgtccgccgtccaagttttcaaggaggaggtgcacgacttgctctgcaccggcgagcttgtgaatctgaggctgatcgagagcaagaccagccaccaagtcgctgtccaggggttaaccacctcgcaggtacgttccagtgtggaggccctagatctgctcactcgagcaaccgggcgccgcaacactgcgagcacggcgatgaatcagtcatcgtcgcgcttgcacttcgttttcatggtgcgagccgtggggtcaaaccccgaccgccatgacagcgttgatgggctgctctatctggtcgacctcgcgggcagcgaaaacgctggccgcttccaggtctccggtgagcggcttaaggaaacgaaggcaatcaacaaaagcctttgtgccctcagcagttttcaacgccatcgcccatggccagcaacatgtacgtgcatctcattttttattttactgacttcggctgaatttctaatccgtgttttgtatgtttacttctactgtaggttccttatcggaactcgaggttgacgcgcctgctggaaccgtgcctctcgaatggaggcaaggtgcaactggttgtcaacctctcagcagatgctgagtctgctcgcgagacctcgcagtctctgcgcttcgcggcaaccgccaagtcctgcgccctcgggtagtcgaggaagcgccgtcaccatgaagcgtagtcgtagcaacaagaaactagctagccaagcaacaagagcaatcaaattatatgtttccattcattacttcaagttttacccctcttgaccttgacggaatcgtgtcgcgggacttgcgcgcagtcttcagcgagtcaaacgcgatgtgggcgacatcgcccgtccaagcggtaccgattccgggcatgctgcaatatttgcacaacgaatctgcgctcgagcagattccagctggtgttctcgtcaaggcagcggagaatgggcacttggatgtggtgcgctgggttattgactgtgactgggacgaagaggaaaacgaggaagatggcggtgacgaggactatttcgatacgccgtacctgacttcgctcggtggtgaagcaagtcttgccattcacgctgcggcaacgaacggccatcttgatgttgcgaagtacctccacgctcgagttgagttgactggccgatggattacaaggaacaagagctgagttccaagcgtcagaccatcagcctcgaagcaggtactcggcgacgaccacccagcggcgccaatttcgagcgacacgatgctgacagccgtgagaaaggggttggcggaggtggtgaagtgactctgccttgagtttagctgcaacgacacgattgatctcttcctgccatcgcatggaaatggttcagcgatacatgtgatggacgaagctgcagcctacggacatttggagatcgtgaaacactttcacgaaattgcatcagcgctcaaggccgagttctcaaggagcgagcggatactgcagcggaaaaggtgacgggtgcgatgtttgagcagaagcgcaatcgccacggcattcaatgcacgacagcagcgatggatggagcagcagccaacaatcacctggaagtcgtcaagtggctgcacgaaaatcggtccgagggatccacaaccgatgcgctggaccgcgcagctggaaatggccacatcgaggtggtccagtggctgcacgctcatcgggctgagggttgcaccacaattgccatggatgcagcggccatcttggcgtcgtgaagtggctccatgagcacgcaactgaagggtgccctacacaagcgatggacaccgcagcggcgtccggtcacctgaggttggtcaagtggttgcaagacaacaggctgcacgaaggacgcaatgaatggtgcagctgagaacgggttgtaaagtggctccacgagaatcgcagtgaagggtgcacggaagcggctatgaatttagccgcaggaagtggaaagcttgagtggtgaaatttctccatcggtatcgaagcgagggctgtacagtacacaggacgctatgattggggctgcgagaggtgaccacgttcgagtcattgaatggctgcatgtgaattgccccgacgattgttcaggtccagctattgatgaggtcactgcacggcgcttgaggctacgctgttcctccacctggttcggaatgaaacgatgagcccagaggtcatctcgaattccatggtgaaacatcacctgggcattggccacttcattgtggataacatgccatgatcggtggtataactcgagctggatacggttctttttaagcgatggggacactcagaaagctaacggatatctactatattttattcttgttgcggtacaaggttcgcaacgtcgcaatgtttgaatgaagcaattcgcgctgcatgaattgccgagacgaaacttgattgaatcgatacacttaccagattctttcagctttgaaactaagctgaagtagcagcggaccaaccagatgtcgagcagtgaagtgccaagccgcttgagtcctgttgagtcgaattgagaactgattgattgaatgaagttactcctggcatctcctagcagctagactactcatgtagcgccttgaagacaccctgtgtacccaaagcaagggttcaaacgaacccagaacgaaactcagatgaagtcaacccttacgccagggagaacaggcgctagtgtcgacagggtgcagaaggagttgtcagaagactgtggtcgccatgacacggcggcccacctccggcaatacccgcgtgctttcgtttccgctcgtgccttccagttgcttgctatagactatagccatgacttgataaggttttgctgtccagtcaggagctgcagtgccgactagcgtcgtgggcagtcccttaaagatgtcacgagtccgaaggaggaccagagcaaccgtcatccgctgcattgagctgctgcgggctcttcgaaaaagcagagccgaagactacgcgcagatggcgaaggcagctagaaggttacttctggttcgatatcgttttggcatttcggttcgcgtggaaacactgaatgtccggtatcccgctcgaacgtgaaggactgcgaacagcgctagccttaccagcaagtgtcaccgtagtatatcggcgtaatggactgctaggagctcgtggcgttgtttggccagcaatccctgctgcaggaccaccagtaggtgcgttcacgagtaaattacgtaatatatgagtctatgttcagatgtgtgatgaaatttacgccgaattcttccaccaagtaggaagaatcttcctggaagatggagcggcgcggcgtgggcaagcggctcaccgacggccagcgcgtggagatcctcaagctgctcgacagcggcgccctcgtgagcgaggccgacgtggcgcggcgctacggggtcacgcgctcggccatctggcgcttgcggcgatcaggccgccgcattctcgagcgctaccaagagggcgacctccaatctcggaacgagcggcgccgcggctccaggcccaaccacagcagcggcagcagcagcgacgcccagtcaatgcaagcgctcggggcggccgggccagcgccagtgccaatagcagcagcagcagcagcagcagcgcccgcgatgcatccagccagctcgatccggccgatcccggcccccgcccaagtgacggccgactgccggccacagccacagcagacgccgcgacatcagcagcagcagcaaccggtccagagtctggagtccatggcgccgctcgtgttcatggcggccaaggccatcggcagcgtccagtcgcccggcgtcgtcaactgggagcgcgtcagcggccacgaggacgaggacttcttcgaggtcgtgaacgacggcgtctccgtgctgcagccgggcacgtaccagatcaacgtggacctgcagcacagccagccgagggtgaactacaagttcgtcttcaaggtctggcacggtaagacgctgctgggccagtgctcgaccccgctgaggaccaagaaggaggtctcactgagcctgctggagatgaggtgtcagctgccggcgctggccaagctgcgcgtggagttcctggcgcccgggttcgccttccacgacagtcgcatcgtgctgcgccttgtgcagtagctccagaggctgtcgacggtggtcaagtgcccgaaggtgagtgtggtgcaacgcattttttattgtgttgatgtatgtgaatgtaacgggaattgacgcgctaacgggtttaccgctgctggtggttgatgtagcgcatggccagcgccgtgagcacgcggaagaacacgatcatcccgaccatgatgccgaaatactgggccacgtgcgcgttcttgatgccgaagacagcctcgacgtacgtctgcactgggatctctccgactgtggcaggcgcgttctgcacgatctggcagccgtgcgggtagtcggacatgtcgagcggcgcgatgccgcccggactggcgcttgccaccatgatgttcacgagctgcttgttggagcacttgccgaaggcgatggctgcgagcgcagagaacgagtagcgcaacggcgcgatcgcgtagagccacttgtagccctgagggatctgcatcgccggagggttgaagcccatgaccaggaggcagatggcgttgaacaagatgccgatcactgcggcgacctcgatgctgggcagcgcgaagaccagcagttggcccatgtacgcttggaagaggatcatcagagccacgttgatccagtacacgactccgttgacgaagccctccagcccaaccatggggtagtagatgaccgtgaacagcgcggcgccgacgaacacgtacgggagctcgacgatcgtgaagctgacgaagtaccagagagcagagtaagtttgtgatgcgcgctctcgatagaatgcggctcgctcctcgaacgccataggcagaatgctgatgaaggacaccccaatgaagaccgtcgaaatgaagaccatgccaagcccgctattgatgccctggtaggttttgaactctgcgctgatgtacaccaagccgaagaccaagccgaggaagattgagatgcagagccgagtcaagttgtacgatggagtgtgccagtacatggtgaagaagcgatcaagaaggaagcggagctgcgtggcgctggacgccgcacgcttcttggagtagctcaccggctttaagtggtcggacgactggaacagaccagcttcggtcatcttgccatcgagagacttcttgtttgcgctggcatggaaatacttgacgaaatcaatgggctgctggtcttcatttgcctggccgacttggcgttggcttgcgacacctgcaccgatgacttccagcatccatgtggcggggttgtatccgtccgtgattcgctgcacactcggaatggcttcaaaatagttgattagggcactgcattcgtgccccaggtcgccgaagtacaccgtctcgccgccgcgcttgaggagcagaagactatcgaacaagtggaacacatcggtagacggctgatggatggtgcacagcaccgtacgtcccgagtctgccacctttcggactccgtccatgatgaccttggcagatctcgcgtcaagtccactggtgggttcgtccaagaagaggatactcggctgcgcagccatctcgacaccgatcgtgaggcgcttcattttctccatggagctgcctcggatcatctggtccgcgatttcttcaaggccaagcagctcgagacactcatcaacagtgtcgaatttgcggctgtcggggacgtccgagccctgacgaaggaaagctgagaaggtgatggcttcgcgaaacgttgagccggtcgaatggatgtcgttctgctcacagtagcctgtgcagcgacgaacgctcaggtcggaggcctcgaaaccattcagcaggatcttgcccttgattgttccctcggtcttgcgtccagcaatcacgtcgatcaacgtcgtcttgccggcgccagtcgagcccatcaaggcagtgatttttccagggggggcgtatccagtaatacccttcagcaagtcgagcgactgtaccggttgaccaggtccagcaggagcttgcacggtgtaccagaggtctttgaaggcgactgaaacaggatccacatttctctcggggtgtgagctgttcacacgaagcaccacgtccccgctgctcggagtgtccgtccgtggagacttcatcaagccgtagccttcctcgtcatcggtggaagcagtctccttctcttcgtgtggcagcgcgatatgctctggtcgttcgtagcggtggtactcgagcgcaaagtacgacatcatcatgaagaacacgtaggcgcctgccatgaagaggatgccgtaccccacccagctcttctccgagggcacgtcgaagaggctgagggcatattgacccatggtcatgttgtacgccgcgcagtagtccacgctctcgtagacgcagacatccagctcgctgctgcggtactggctcacgacggcgctgcgcacggtccaagccacggggtcgatcccgtagagccaaattagccagtcggggaggctgttcttggccacgacgtagccgccgaaaagaatgaagatcatcaagttgaccattgcgacgggcttggcgatgctcaagttcggcgtcgctgcgacgaggaagaagaacagcgccaggaacaccaagatgacgagcatgaggaagagctcgaacagcaagtacgcgcccgcttcgttcacgaacccgcccacccagtagacgagcgaaccgaacatgagactctccaacaacgccaacgggatctggctgattgacgacgccagcacgaaggacgaggtgcggtagaagttggcggcgcgttgcttgtagaagacgttgcgcgagtcgtagaacgtcgacagcattgcagcttggcccagccccaggaagagcatggcggcgaagatgacgcccatcgtgacttgggtgtccgccatgtccatttggtagaagagactcgcgaagatgagccccatgatgatcacaagcatcgcgcggccgatgaggaacgcgtggttgcgcttcgtcaggatgaactggcgcttcatcagcgtccacgtgctcggccagaagctctgatggaactcgcgcactggtttcatgaagttcgcagcgtcgacggagtcttttagggctgcagctcgcgcatcgtcctcactctcaagcacttggtagagcgaagagttgacccacagatcggcgaactcgcttgcaagcatcgggtgggtgggatgctcctgagggggtcgaccttgctggtactggatctgctggggcgtggcgaggtcgcacaggaagtcggcgatgtctctcctcggcggacagatgaagccaagtgactcgaagtaatgctgcacctgagacgtgggtccatggtacaacacgcggccctcgttaaggagcaggacgctgtcaaacagctcaaacacctcaggcgacggctgcaggagcgaaatgaccaccgtcttgtggaagcgctgggccatactacgctgcgccgcgataatgtcgaacgccgcagcgctgtcaagtcccgtcgtgatctcgtccatgagcgtgacgtacttcatgccgaactccatttcgccggtcgtcatgcgcttcttctcgccaccggagatgccgcggtgaagcgcattgcccacgatcatgtgctggcagtcttctagtccgagcgtctggaggacgatctccgggtagtgcttgaagacgctgctggcggcttgcagagcagacgcgttttccgctggcaagccacgcgagaggagctccgacgtccgcttgtccaggtgcgggccgcagcactcgtgcgcgaactcgaacgtctcgcggacggtcatggtcggcatgtgagtgtcattttgagtcacgtagttgacgagttgcggtaggcgcttcagcagtttctcgcgggggacgccgctatacgtcatctcgccctcgacggagatctctttcttcatcgggaaccgtccgctcagcagcttcatgagggccgacttgccggcgccggactgaccgaggataagtgtgaccgttcctgggcggaaggagcctgtgacgtcgtgcaggatgtgcttgcgcaccgagtgcttcttggcggagaccgcggcgaccttcttcatgacgtggttgggcagcgtcggcagttcgttacgcgggtcggcgatctcctggtcgttggcgtccaggcgccgacgatgccgcgggtcgtggacagccacgaggtcggctgccaacgacacgtgcttgaagtgcacctccatctgggccatcgcgcgcccgagcgcggtctccaccttggcggagatgtcttcgtgcagtgcgtacggaccgcgtgccatcatttcctggccggtgttgtacccgactggcggctcgggggttcttggctcggccaccatggcgcccagggtgaacaaggttgaatgtggcttgtggcttgagtggatttgctttcgactggtaagttgaggaatgagggagcgagtatggcaactgcagtcgagtctaccgagcttgcagaggctggatcacgccccgaaccatgggccgtcatcgcctgtgtggtacggcgcggtgcgtaagcgggcgcgatatttaccgctgagaaatgatgacggccgcgcatctttttcgccaaatcgtgccgtttcgcgggcacttcaacctgcttcagactcgacgactgcagttcgagctgaggttcataattctgggggaagattgctgagtacgttgagcgtccatggtgacgcgcacctgaaggtggtgaccaacaaagacgtgtggctctgccttgccgttggctggcgatgtggtgaagcgaggcgttatgttgctttggtatcaatacctttcgcaccaagggggctgctttcagttgggtggagaaagcgtttgaattggtgtcttcctgcgtccagttcggtccatgaagtacgactactacgcaggaccttgaagctcaattctgaagtttgaacgaatcgtgaaccacccaagctgggctctttagatctgggttttattacgaccagcggtgctcgcgcatctttttttcgacgagtacgcggtaatcacattgaactgagcggggttaagaagaacacacacttggcctagcgctgttggtggttgctgtaccgcatggcgatcaaggcgagaatgctgagcagcccgatcatcccgaggaagatgccgaacgaccgcaccgtctcgtcgtagacaacgccgaatacctggtccacgtaggtttgaatggggatggaaccgatctcgggcggggcgttctgcagtatctgacagccgagcgggtacttggacatatcgatcgaggccaaactgctcgcgctggctgcagatgccaggctagacgaagacagcgaggcaccggatacagtggcagcggtggcaggtgatgaagcgctcgtagccgcaccagtcgccgctgccgccgcattggcagcggattcactggccacggatggggtagcgagctggatctcggccagctgctcatcggagcactcactgaagaccgtgcccacaagcgccgcgaacgaatacctgtgtggagagatcgtgtagagccacttgtagcctgacgggatctggttcgctggcggattgaagcccatgagcatgaacgagatggcgttgatctgcatcccgatgatcgacgccacctcaatgctaggcgccgcgaagatgcagacctgccccaggtacgactcgaaaatgatcatgagtgccacgttgatccagtagaagacggcgtgagtgaaccctgagaagcccaccatagggtaaaagacggcggtgaacagcatggcacagacgaacacgtttggaatctccacaacggtgaagctgacgaagtaccaaagcgtattgtatgtttgcgatgagcgctcgcggtagaacgtagcacgctcctcaaacgccagtggtaggacactgatgagagcgaccagaccgacgaagaccgtggagaggaaaatcaagccgaggccgctgttgattccctggtaggtcgtgtagtccgcatcggagaacagcaagccgaagaccagtccgaggagaaccgaaataccgagacgagtcaagttgtaggagggtgtgcgccagtacgtgatgaggaagcggtgcagcaagaagcggagttgagtgatgttccgggccgcgcgcttcttgccgtaggtgacgggttggtactgctccgagggctggaagagaccaggctccgtcaacttggagtcgaggagcatcttgctggcactcctattgaagacgtcgacaaagtcgatgtcctctgtcggctgcttctcgccgcgctcagctacaccagcaccaatgacctccagcatccacgtcgccggattatatccgcgtttgattcgcggcacgctcggaatggactggaagtagtcgactatcgctcgtgcttcgctgccaagctctccaaagtacacggtctcaccgcccttcttgagcagcagcagactgtcgaacaagtggaaaacgtccgaggacggctggtggatggtgcacagtaccgttcgtccggagtcagcgaccttgcgtacgccgtccatgatcactttcgcggaccgtgcgtcgagtccgctggtgggttcgtcgaggaagaggacgctcggctgcgctgccatctcgacaccgatcgtaagacgcttcatcttctccatggagctgcctcggatcatctggtctgcgatttcatccaggtcgagcagctccaagcactcgtcgacggtgtcgtacttctcactgtcggggacgtcggctccttgtcgcaggaacgccgagaacgtgagcgcctcgcggaaggtcgaagctttcgagtgaatgtccgtttgctcgcagtacccggtgcagcgtcgaacgctgaggtccgaggcttcgaacccgttgagcagaatctggccgcgaatggtgcctccagtcttccgtccagcaattacgtccatcaaggtcgtcttgcccgcacccgtcgagcccatgagcgctgtaatcgatccaggaagtgcatacccagtgatacctttcaagagatcgagtgcgtgggctggttggccgggaccaccggggactgaaacagtgtaccacaagtccttgaaggccaccgtcaccggttccaccttcttcttgcgggcgattctatccatgcggaggacggtctccgtgcgtgcgtcgctgtccaagatgtggacgtcggatgtgtaaggcgacgccatctgattgaaggcgttgtctttggcctcatcggtcttcgccttgcggtctttcggttccacgggcagcgcgacgttctccgggcgatcgaatcggtagtactcgaggacgaaatacgccagtaacgtgaacccgaggaagatcagcagcaagaagacgatgccgtagccgatccagtattcctccgagggaacgtcaaagaggccgagcgagaactcgcccattgtctggttgtacatggcgcagtagtcgaacgcgccgtagacgcacacgtcgagctccgggtggcggtactggctcacagcgacggcgcgtacggtccaggcgacggggtcgagccagtaaagccaaagcagccactcggggatctggttcttggatacaacgaatccagcgaacagaacgtacaagagcacgcagaccatggcggcaggctcggcgatgctcaggttcggcgacgcagcagcgaggaagaagacgagcgacaggaagaccaccagaatgagcaggaggaagagctcgaacatgaggaaggcccccagctcgtacacgaagcctccgacccagtacacaagcgacccgaacacgacggtctccatgaccgccaacgggaactgcaccagcattgtcgccaccacgtaggacgaggtgcggaagaagttggcagctcgctgcttgtagaagacgacgcgcgcgtcgtagaaggtgacgatccaggccacctgccccagtccctgcgatagcacggacgcgtagatgacccccatggtcatttgcgtgtcgtccagaccgaactggtagaagagactcgcgaacaagagcccgacgacgatgacgagcatcgcgcggccttgaagacacgccgggtctctcttcatgagaatcatttgccgcttggtcagcgcccacgtgctggcccagaacccctggtggaattccgagacggccgccatgaaggcctcagcgttggcagccatctccttggactctctcgcgtccgcctccgcctcgagctgctggaagagtggggagcggacccagagatcggcgaagtcgctggcgtttcgggggtgcactttgcggcctccgagaggaacccccagttcgtattgagcctgctgcggtgtagcgaggtcgcacaggaagtcggcgaggtctcgttccgggggacaaatgaaccccagagactcgaagtagccctgcacttcgcgcgtggagccgtggtagatgacgcgcccttcgttgagcaccacgacgtcgtcgaagagcgcgaagatctcgggcgacggctgcagcagcgagatgaccaccgtcttgttcatctgcttggccaacttgcgctgcgccgcgatgatgtcgaaggcggcggcgctgtcgagccccgtgctgatctcgtccatgagcgtcacgtacttcatgccgaactccatctcgcccgtcgtcacgcgccgcttctcgccgccagagatgccgcgatgcatgccattgcccacaatggtgtgctggcagttgtctagcccaagcgttcgcagaaccacgtccggatagtgcacctcagcgctgcctgcagggacggcgttctccgcgggagacccgcagcactcgtgagcgaactcgaacgtctcgcgcacggtcagcgtcggcaggtgcgtctctgtctgcgtcacgtagttgacgaactgcggcagacgcttcagcagcttctcgtggggcactccgttgtaggacattgtgccctccacggtgatctcgtggtgcatggggaacctcccgctcagcagcttcatgaaggccgacttgcccgagcccgactggcccagaaggagcgtgacggcacccggacggaaggagcccgagatgtcctgcagaatgtgcttgcgcaccgagtgcttcatcccgagcatcttcttgaccacgttgttgctggactccttggattgactccagtcgtcgttggtggagcccaggtcggccgtgagcgacaggtgcttgaagcgcacctcgatctgctgcaggtcgctctgcatgctcatcgtcttccgccggatcgcagtgtctcccaccatagtcaccgagctacgaccgacaccgaagctcgctgtccgcttctcgcgcgtcggcgtcggcgttatcacgtacgaagccttgtcgactttctccaacacgcccatggtttgctactggtactctcgaggtggggcggttggcggggttgtcttgcgctgagcaagttggggaatgaggctgagagaggacaaagggcgtggatttgttcgccttcaggttgtcgaatcggctcgaacgaaagctgagctaaaggtgtgcacgagcacaatactttaaactacgcgcttgaaagccatgtagatgtggccacttctctccgtcctgggtcctttctgaaccaaagggaatggctactgctggcgtcacatacttcagcgtccggcgactggaaagacactcatggcaatttgtctccggatctcgaaaaccgaggggttctttttgtcgcgttcacagggcagtagcgccatctcaccgcacgaccccctgcagtgtcaagtcgtttagtcgtgtccggttgatctctgttggaactgcacttgaagtcaagtgttctaagccgcagcttaatgtcaacttttgccccgtaggagctctgtatccttcttctagtagaagcggaccccttcagcgccactagtccaagatagacccaacgctccatgacacggccatgatcgatctgtctaactgttattcgaacaaagtagcgctggcttgatcatggacgtggtaatattaacgaagcttttagtcctgctcgcgaggttatcgctccatgctgcatgcattggtactttaaggtgaggattcaattggcacagtgcctcatactgtagtaatcgacaaaggatcacacactacaggaaggtacccaccgctcttctctctcgcagcaaagtggccagcatacttgagtctcgacgtcatgttgcgaccacttagcaaatacagccaccgaaatcaaggcaggaggcccagtgaggtctctttgcccctgcgactgaagttcagttaaacattgccatcgccatcgagttgcgttcttcgagttgcgtacttctcacgatcgaataaggtccgctccctgtgtgatgtgcgcaatgctgtactcactcgagcactcaccaaagatattagcgctcctcgtcctcctcctcgacaagtgacggcttctgaaatcaagcgcttcagcaaaggatacaaacgagcactcgactgtgcttttcggcattactgcttaccagattgcgatttggatggtcgacgatatcaatgctgcaggcttcatttgcggacaatgaaagagcctgttcgacagcgttagaagtgccctcacgccatgcgtactgcgaggcatacacacgcggtgggcccgataggcaacagacgatggagccgacaggcaatggacgttggacagaaccaacttgagaaattgacagacttgggcttcgaacactgaaaaggtaaccaagctgtttggaaatccacagtgcgccaacggtggtcgacgtgcggttcgatttcagcagttgcctaactagcgcaatgaagtgagtctcgtggccagggccttcctccacgtgacgcccaccgacgcactgccgcggttggggataagaagtctgcaacgcagcgacttcctgctacatcaggtctgttcgcttaggctgctagcgtaacgagtttgctgactcaagagaaccggagctagctggaatttcggcccagaatcgaccagagaaacggagacgacgctcgcaacagcaaacgaagcaccatacaacgtagcagcaccgaagcaatcatcgaaagtctatagccattacagtacgatagcactggagtcgagacgttcgctgaagaaggcgtccagcttggcagcaagaggcatgaatgcgtctgggttcaagtagcaggcgaccgccgcgagggcctcgagaaactcagccagagtcaatacaacgctctcatcgtgttgtccagcctttgccttgctcttagacccaacactcctcgcctctgtcacactgtcacccgtggtcggtagtgtgtccgaggctccagttggcactctagccaagtcgaagtggacactgtcgcgctcaagctgcagcgtctcggccagaatgtgctggacgtcgtcgaagtgcagcaagttgtcgcgaaagaggtcgaagtgctggcagcagttgacaaacccgttcgcagacagcatcttagctgtgccccggagcccggtactgtcctgactagcaaagcgcctctcggtcttcgtctcactcaacacaaagtgcgagtacatcgatcgaagtttcttgtggtgcgtggtgaagacctcccgacactcgaacgtcagcagctgcggtcggaacgcgttgctcttctcgtcagagtgcatggcgttcgggaaaataatctcctctagaaacttacggaagcgtagtgctagcggtagagtgagcgtagtatccgccccttgtttccactgcacccgatcactacggacgatgtgtaccagagcctccacgaactctgctggggtcatctcccttccgttggtcccacccgattctttggacggagcggacagtatgtgcgtgagtggtaaagttgaggtggcggcccccattgaggctgcgacgtcgggactcaccttctcgaacacgctctggagcaagtcgtacgggaagcactgagctctgccgaagacttcgcactctttgaggaacgcatagaactctgccaacgacatacacgccgagatcttgtagaagaaccgagcttcgtccacggggctgcccccagtagagctgcgatgggatcgactgctgtcgatgttggcgtagaagcggtagatccggcgcagatgctcgtagtgctcgcccagcacttcttcgacccgttgcagctcgtctgtgagctcttccggcgtctgcttgctgtcgttttggctcgtgaacgcctggacaagcttcgggatgtgcagcgtagtgagcatgtacttctcgcgccatactctccgatcgaccagttcaaacggagcttgctcgcgccctcggcgtgcgagaagacggagcgcgtcttgctggacacggcgttgcagacatccccacaccctcatggcgatactgcgcttagaacatgcgtactgcaccgtgttgactgcattctgtagcacaatgctagccttcgccagtaattgcgggggcgacgtcacttccgggggtgcctttgtcgcctccaacacgtcgaatggggtgtggagctctctccattgcgacctcacggagttccagacctcacgagcttcattcagagccacttgagcctcgcaccatgggtacttattggtagagtttgatgtctgcacagtcgtaacttgctgctgagtactgaggctcggatgttcacagaccaggaagctgaacaagcagaacaccaagtcgctcgctatttcgctgctcaatacgtggtcgcttaagaacgctgggcacgccgggttcagctgctcagccaacgcagcgcgcagctcctcccgagtcggaaagggggtttgccttgacgaagcactagcagcagcaacactgtcagccgcagctcgtgacagaagcatgaacgcgctctgcattcttgcagctcttggaggggtccgtcgccttttacacatcaacacccgatcaagaatatggcgaagcgcgtagtagttgtgcatgtcggaggagaagttctgaatcaagcccgcgttgaatggggagaggtatttgaatgagcccccgcactgttcgagctgaaagttgatccatcgcagcaccaacagctcggagggtaagcggaggaggtcgttctcgtcctcgcctttcatgaccagcacgcccatatcgacgtagtcctccacggagacagcgtccaacatgttttgcaagtagtcgcactcgcagtccacgaaggcgaagcagagcttcccccactggttggagatcgtctgcagtttgcgctcctggctctgtcgaacgcgcagttccagttgagtgagcagttcttcgagcgacagcgtgtgtcgtttagccaggtcgaggtgttcgcggtgggctttcatctcgactttggcgccttcaatctgcacttgcagcctgccgatgagctcctggtagtcgtgcttgttgtcgcggtagagctggatctgctcgtgggacttgcgcactttttcggcgacggcgtagtcgctccagcgccggaacagcttcatgagccgctgcttggtccagcgccagcgcgtcttctccagcagaacgcgcgtgtacttcttgcggatgatgatcttcttccagtccgctagcgtttggcgcatcacgagacgaccccatcggttggcgacgcggtcgaccatgagctcgttgttacgcagtcgcttgagcatgaagtcgttcagcgagtccaagcgggagctacatgttgtagaccagtgtatcagtagatgaacgtaactacttgggaataatgaggagaaacactcacagacgttgctctagagcctctttctccgccagaacctccttgagctcggtaaagtaggcgcgacgcgctagtgcccccttcaatgcctcgggggcgaagcccgcggtggactccaaggttgaaatattgtttggttcctcttctctgtgtgaaggatccttcatgtacgtggacttctcgagctcgactcgtgtaatctgcgtgaggttctggaatcgcgggaacttggagctgagttttgagagaacatcgaagcaaatcgctgtacgcagcggatttgggacgcccaagtgttcggttgactgtagtgccttggagaaatcgtactcgaagcgagaggctgcggttttgggcacacccttctgtcagatcaactacattttgtcgctatcaagtacaattggcgccaccttgctgctcgaaattcagctcttccgacccgcacttggccctccacgtctcgatgttccgcagtcgctgcgtcttgaagtaagattcgacttgttcatgtttcagcggggccagagtgttgtcgttggccttcgctggtccgttcgtcacctcctgattgcccgctccagctccatcttcagattgcatcgcgaactcggcccagcgaccttctcgtgggacgttgccaagatatcgaccgatcgatcggtgatcgtttcgctcagcccaagttggcgccagcgctgctattcctgacgattgatcgtttgggggggtggagttcattcatggctccctttcatcactgcaggcacagataatttggccgtatacccagcagccaccaatgaccgactacgtgccgtgcgcgacgccccctgcccctgccaagggcttcttctcgagcatgaacccgctttcgcttttcgatgatgtggagacgctcacgccgcacgaatttctccgcgatttctacacgcgtcaaggcctgtacgacaagttggaagacgtggacgcgttggtggagacgtacggccaccaaatgcacatcctgtacgccgagctcgacaagaagtgcgcaacgaaacttttgagtattttcaaccaccctccgggtctatcaactaatctgctttgcatgtaggtacggcacctcattttgtaccaaccctccacctgtggcgtctgaaacccgcatcgcggagcccgtcacaccgtcatacacgtacgctgctcccacgacccccaaaagtcccggtaaagctccggtcaacaaaagtacggctctaattacacgtatttcaacgcatagtaactgagctaacttaacgtgacgtgactttgacaatacctcagttgtcctgttggggaactccggagtggggaagaccaacttgatcagtcgcctgcacaagggcgagttcaatgaggagttcgcgtctacgatcggtgtcgagttcctcacccacgtggtgaaggtcgacaacgcggacgtgaaggcccagatctgggacaccgcaggacaggagcggttccacgccatgatgtcgacctactaccgcaaggctgcaggagcgctgctggtgtttgatgtcgggaaccgcgcgagtttgcaagacgtcgagcggtggctcgatcagctgctgaatgtcgctgagcccggactgcacgccacactcgtcggcaacaagtgcgacctgcccgccgacaaacgagcggtgacagcagaggaagcccgacagtttgcagcggcccaccacatggcctacgttgagacgtccgccaagacgggcctcaacgtcgaggaggctttccgtggcctggttgcagccatccacagggcgagactggcggacattcaagaagccactctcgctacagtcgaactcagcggcaagaagagtagctccaactcgctcttcgactgcaaattcttctaaacactttcgctaaacacaaaatatgaacttgatccaattcctcagtattttcaaacgattagatccttcatcgctgctgctactctgttgtaccgcactgggctgcgaaacttatcagatctgcgagttgctcgtagatttcttgtccaccgactcgatcatttggcttacacgagatgataacttcgatatactattcagataaccaggaaacgtcagaaatttaacagtggatgaagacaaaagcggttgacttgcgtacctctagcagcgagcgcttggtctcgtcgtagcggcgttccaactctgaagaagaacaggattagtaagtctgaataatatcgactttcatttgagatgcaggacacttacctcgaacttgttgcgtttcttccttcagtatcctcgcgaactctgccgttttcactccaggggcgctgggtcttggagatgttcgaggtcggtcctcaggtcggctcttagctttcgctttggtgctcagctcggagttttcaagcagtgacgccggacctgccgacatgactgggcgctccaccacccgattccgaggcaggccgtaccagcgacgcagcttggacgacgacgtgggttttcgaggatcgtattccttcatgtggccctgctgctggatctgcatctcactccggttcaaggcgacgcgcagcgcctgcatctcttgcgtgtccattaacctcggagtgtacgggcggtagtcagaggtcacttccagctcggagacgccctcttcgaaccaagtttcgctctcgtcgttttcccaggcttgtccgtcgctgtcgcgctcgcagtcgtcttggccttcgtgttggttcatcctgggctggtactactccgcacttgcgagatcgatggcgataaacaacacagttagacgagagttctccacctattctccacctattttcggcacgcgatagcaggcagatcgctggtttctctcgaggtgcacccgagacactgtgagcgaaagctcagagaggatgtacgtgggcgaggaggtcttcggaaggcaagtacaccagagagttgatctactattaataatattaatttaatattagtaaaggagaaatattgatggatctgcagagttgtatcggacgttggtgctgactgatcggttgtctcaatcatgaccgcagcagttgttcacacgtgagtacaaagattttgacgagggctttggaaatgtcctgtgttcgctgctactgtccacgtataaccttgctcggcaagtgtatgctccaagcttctgctcgcacaccgtcgcagcgcatgacaaccacctcgctatagcactcgacgccagcctgtcaacgtgacaaatagctcgcgcataaccagcagcgatgagcgattgtgccacatggctggaaccacaatcaaacctcgcaaaagttgacggcagggggcatgaaccgcaagcgtttgcaccgcattatggctcgaattcccagccgcaattcttcgactcgttgcccctgaagcaggctaagccatcgttcattttctgattccccggcgaccaacacctacaacgctgtccccaccgcccgcccacgtcggctacaatgccaaccccggaggtcgtgtacacttcgggcaaggagatgctggggcatgggcccatggagctgcaccaggacatcgccaccaagatcgaggccgctctcggggaaccgtttcctcggatgggagttcgcttcaagcacgtgtcgctctccgccgacctggtggcgttgacaaccaaggacccacaaacagccgatgagctaccgacgctcaccaacgaagtcctgaaagctttcgcgtcgcggtcgtccaagacgcgcgcagtacggaaacccattctgcaggacgtcacggggtccttccgaccgggcaccatcacgctcgtgctcggtcagcctggctcgggcaagtcggctctcatgaagctgctcagtggacgcttccccatgggcaaagccgtcactctggagggtgaaatgacctacaacggcgtggctcgcgagacgctattaaagcgcctgccgcagctcgtcaactacgtgacccagacggtcacgcacttgcccacgctgactgtgcgtgagacgctcgagttcgcctacgagtgctgcggctccaagctcagcgcgtgagcggaggctcatctagcttacggatccccggaggaaaacgctcgtgctgttgacgcggcgcgcggcgtcttccagtactacccggacatcactctacagtctctcgggctcaccgattgccagaacacgatcgtgggcaacgaaatgtatcgaggcatctccggaggcgagaagcgacgcatgaccacaggcgagatggagttcgggctcaagtacgtgacgttcatggacgagatcagcacggggctcgacagcgccgctgccttcgacattgtcgctgcccaacgcagtatcgccaagaagctccatcgcattgtggtgatctcactgttccaaccgtcaccggagattttctctctgttcgacgacgtcctccttctgaacgacggtcgagtgctgtaccatggacccacgcaatcggtccagagctacttcgagtcgttggggctgacttgtccgcccgaaaaggacatcgccgacttcctctgtgaactcgctactcccgaccaaagcgtgtacgagtccgtgcagtcgattccaggtcgtatcgcacctccacgcactgctcacgagtacgcggaccgctggatgacgccaccactcttccagcaacgagaagccgaagcggacgcacaagattgacaagtgaacgaccacagcaacgtcacgaggaggtgcatggccgacgtaacggagttccagcagagtctcctggccagtttgcggacgcttctgaagcgtgaagccattctgagcaagcgcaacgacgcgttcgtaaaaggccgactcactctcgttctcatcgtcggcctcattttcggaagtctcttcttcagatggatctggcggacgctcaagtctcgatgggcgtcatcttcgcggcgtccctctttcttggtctcggtcaagacgcaaacctcgtcgtattctacgacgcgcgtagtgtcttctacaagcagcgaaccgccaacttctaccgcaccgctgcatatgtactcgcgtgctcgctgatcgagattccgctggccctagcggtgagtctcatcttcgggtcgctggtgtattggcttggaggtttggtgcacgaggtgggggcgttcctcctcttcgagttcttcctcactctcaccatcttagtgttcgcagccatgtacttcctgttggcggcagtgtcaccgaatctcaacattgccaaacccggactggttgacgtggctctattggctcgaccccgtggcgtggactgtgcgcagcattgcagtgagtcagtatcgcagcagcaagctcgacgtccgcgtctacaagggcgtggactactgctcgacctacggccacaccatgggcgagtactcgctcggtctgttcgatgtgccctccgacaagacgtgggtggtctacggcgtcgtctacttggtcgcgacgtacgccgcgatcatgacgatctcgtacttcgttctggagtatcaccgctacgagcggcccgaaaatgtggcactgcctcacgacgagtctgtggacgaggtgccagcggaagcagcgtacaatttgctagcttcaccgcacgcgagtaaacccgagaagagcttggtattggcgatgatgacgtcgttgtcaatatgaagacttcgacgcaccaaatcaagattccgcccctggtcgtcgctcaaagacttgtggcacaccgtctcggtgcctggcggtcgaggccagcctgcgaagaacgtcgacttgctcaaggggatcaccggatacgccttgccagggacgatgacagcgctcatgggatccactggagctggcaaaaccacgctcatggacgtgatcgcgggtcggaagacggcaggcatcatcaagggcgatatcctgctcaacgggttcccggccaccgacttgagcatccgccgctgcaccgggtactgcgagcagaccgacgtccactccaccgcttcgacgttccgcgaggcgctaacgttctcggcgtttctccgccaggacgctacagtccccgacagcgtcaagtacgacacggtggacgagtgtctggagctgctcgggcttgacgacgtcgccgaccacatcatccgtgccagctccatggagaagatgaagcgcctcgcgatcggcgtcgagatggctgcgcagccgagcgtgctgttcctggacgagccgaccagcggcctggacgcgcgctccgccaagttgatcatgggcggcgtgcgtcgagtggccgactcgggacgaaccgtgctttgcacgatccaccagccgtcgtcggacgtcttctctctcttcgacagcttgctgctgctcaagcgaggggatgagacggtgtactttggtgaattagggcgtgggggcagctcgatcgtccggtactttgaggccatcccgagtgtccctcgcatcgagaaaggctacaacccggccacgtggatgctggaagtgatcggagccggtgtcgacagccaccgcaaggccgacccaagcgtagccactacgccaaacggaccccagcaggcggggatagcgtcaccaccgactttgtgtcagtcttcaacgcgagctccaacaaggcgcttctggacgccaaactcgcggagtcggggctcttccagccgtcgacggagctgcagcccctgaactacgcgggcaagcgcgcggccggcaacgccacgcaactgcgcttcctgctgcggcgcttcttcaccacgtactggcgcacgccgtcgtacaacctgacgcgcctcggcatctcgctgctgctgggcttcatctttggcttcgtctacctgggcgccgagtacgacacgtaccagggcatcaacagcggcctcggcatggtctacctgtccaccatgttcgtcgcgctggtgtccttcatgagcggacttccgctggtgtacgaggagcggtcggtcttttaccgcgagcgcgcggcgcaggcctacaacagcgtgtggtccttcctgagcttcagcctcgtggagatcccgtacgtgctggcgggcgcggtgctcttcacggccgtgtactaccccatggtggggctcggaggcctggccgaggccgcactctactgggtcaacctcgcgctgctgatcctgttcgaggcgtacctggcgcagctggccatgttctcgtccccgaccatggagctcgcgaccatcctcggcgtcatgatcaacgcgttcgggctcatgctcacgggcttcaaccctccggcgctgcagatcccggcgggctacaagtggatctacgacgtctgtccgcaccgctacagcttctccgtgctggtggccatcgtcttcggcgactgctcggacgcgcaactcgccgagatcgcgctcgccagcgccaatgacacgagcgcgctgggcctctcgagtgctcacagcgttggccatgcgcttcgtcaaccaccagcggcgttaggtacaaatagatgcatctacaagttgaagttgatatcatgttccaccaatcagagctccgttatgtgaacaaaaaatgtgttcacgagttcaaagatgttcaccttgagcagatatagaaggcaactaaccattgcccttgcctgcaactcgcgaagtaggagagattttattttgtctactacggtagccattagaatcctaaaatccacggcggcggaaacactaataccagcccaatctttcttcaagcagtctgcagcatcactaccggtaagctcccggcacccaaagtctatgggtctcataaaaatcgactgcgcctgtgggttagttgaatcgcgattcgtacatggttgattacatcactttgtttaatcgcgattcgtagctaagttgatgagtactatcaagtacagtacatgtacacaaccgtaggtggagcagctttactgcattagcagtgctattctggaattaacagcaagctttggctgctacgtgtacatgatataggcacgcgctcgcgtcagttgcgacgggcacagcggggtatctctcgtcagataacttgttgaagcgctggattgtaagggaaagctgcaggatcggttgtgccccttctttcgagtgtttgccaacttggcactgccaacgtctgggtggctccaatttgtcaatcgtcgacaaccagcctctttctcacttcccagaaagcgcgcccggaggacgatgcggcgctttttcctcgtgttgctggttgtcgccctcttcacggtcgtcgatgctgctttgacgacttcggtaaggaaattgaccacgctaagtactgacctccccggcaagaggttattaagaattgagacaaagagagggaaggacagtggaggaggagaagaagaaggagcgagcgatcactgctcctggcctgtcgaagctgtcaaaggttaaagagtggtcgtcgaaggtgaaagagtggaggctgtccaaagtcaaggagtgaccttgacagattcaaggcctggtacgccgattacaagcaggtgaaagcctggacgaaggagaagaagacgccggacgaagtattcaagctgctgcagctcgaccaaaacatcgataccgttctcaatagcccaaagctcacgacgtgggccaggttcctgctgtcctacaacaagaagagcgagaatgatgtgaccttgctcggaacgctgaccaagttctacggcaacgaaccgttggcgaagattctcgaactgtcgagatggaagtcggatacgaggctacttgctagcgggctgcagaacgcgcagttgactggttggcagggcaacgggctgaccacggacatcgtctacagtatgctgaaggttggcgatcagagcgtggagaagctgctcgcgaacccggcgttgcacgtctggacctacgtctcctttcggaggaccgcgcacgacccagagagttacgtgtacatggtcatagttgatggcgtcgtacgacgagatgggactagccaaggcgatccaggtggcgaccaaggacaagatggtgaccgagtttatctccaagcgactgccgacggcgcagttcaagttgtggaaagaggaaggccgggcgccgaaggaaatcttcaacatgctcagcctggacacgaacaagtggccatatgaccccaacgtggaggtctacagagcatacaagttgtatctattgtaggcatttcgtgttacttgttttatgaagcgattcatggtctaccgcaacacatttgtggtggctcgcttcaagtggtgcgatgcttcgtcgccacttgtggatggtcagtggcgtgttgctggagccaaaccatcttgaattccaagctggaacgtgaagtgacccaccttgattaacagttgaagttgttaatatcattttccaccaatcatcgaccgtcgtccgctcgacgggctccgttatgtgagacttgtgactcaggcgcaccgcttcgtcgctaagagcctaagtccgctcactcgctcgttcgcctgcggttggacagcagcagccacgcgcgtcttggaggaaggcggatccttcgcggagtggagtgatcgccgtcgatatggtacgagcgagagtgctgtctacctgcacttgtgtgtagccattggggcgactgcagcttcagattccgagtgaactttgttctgacgttgtggcgacgacatgaatcgtaggcatccgatgcacaagatccgcagcgccgcgctgcctcgtcacagccgactccgccggagcagttctccatcttcccagccttcacgccggaccccattcgactggcggaactcgcgggctcgtcgctctactcgccgccagtttcgtcccgaggggcggagacgcgggagatcttcgcctcagtcagcaacggtcaggcgttctttgagctgctggaggctcgcggactctcgctcggtcctgcaagtggtgggggctcagagggtggggactctaccgggaatggaaggatcgacgtagttcgctgcgaggacgggaggaggaggacgctgctgcaccaggcgtgtcggtgcggcaacgtgcaggtggccaagtgtctgctgttccatggagccaacgcctcggcgcggtgtcgagatgggaggacgccgttccacaatgcggcggcgtcgacgcgagcgacggcgctgcagctactgaagctgctgttcgagcacgacccgacaggaatcacagcggtggacgcgaatggctcgcatttgctgcaccttgctgctattcacggcaatctcgaagttatccagtggtgtgcagagctgacaacgcagccgaccggcaagaaagatgcgttgaggagccccaggcctctcatatctcgatacatggtgccgctgggggtcacgtccttcagcgggcggagtattctccactatgcagcgtacaatggacgcttggatatactgaaatggcttcttggtgaggagaacccgcgtcgtggtgagctggcgttgggcgcgatggacgccaatgggtattccgttctgcattacgcagcgatgggggcgccgctggaagtctgtgaatggctcgtgctcgaagccccaccgcggcatcaactcaatctgacagcaagaaccagcgaggggaagtcagttgtggaacttgctgcagctcggccagcttctatccagaagttcctggctgaggtgaccagagtgccgagtgttccttcaggtttgcgttgtttaggcgcagacacgacttcgttgggcgtgggctgggacttggagccggccagcacagacacgcgcctttgggagactctgaagcccttgtacttccacttggaggtgtgcaagaagcccgcgagcttatcccatgccagtggattcctcacaatgctcatgttaatgccaccggcatcgccagcgagcccgagagcatcgccagctgtgtcttctgcgctgctgtcagcaacatccttgttgcactgggaaccgctcggcgttctactacagcctgaggcacgtgaacattggctctgtggactggagaaagacaccgagtatctcgtgagaatgcgcgcacggaatcgcaatggcttcagcggatactcgttgccgaatctctctggagtattcacgactagcgatggtggtcgacgccgcagcacctcaagtctccaacggttctttggggccattaaagtggatccgccgatggaagacatcgctctctcgtttattggagacctgcacttcgagctgatagaggctcgaggtctaccgcgtgccagcacgtccactctgttggcatcaccaatgagcccgaagtcccagaaagcttctcaagggcgctactacggagtggtaatcattgaaacacccgcaacaccggacgtcgaatgcagtggagactcgcgcgccagcaacagattaatttattgcgtgcggtctccgctggcatcgctgcagcaagatctggtgctatccgggagctcgcaggtgtggcggcatcctcgattcgcactcagcactgtgtttcgtgtacccgagtctctctcgaacacccaagtaaccatcgccgtacaccacgaaacccaaggacaatgtgattcaagctgcgtcggtcgactcacactctccctgctcgatctggtgcaagggatgccggctaaaatgcagtggctgcctctgattattatgaacgaccaacaagccgatagtagggtagttctgctgcgtacacttttcctcccgaacggaatctcggagctaccgcatccgacagtgcccgatatgtggggctctacggctgaggaactgctcagcacaccacaagcgctgacatctggaaaaggagatgaaattggaaggggttcgcctcccagttcgtcgagttcgtcagcgtcgacatcttccacctcctcgtgctcaagctcgtcgccgttctcacactcctcctcgtgtgtagatcgattgggttttgcagtttttgatcccgagatgcagctacggaatggcgagtggtgtccccgcagagtcccctctggagctacgaggtcctacgcgtactatcaactcttggtcgatgctctggaacggctacaggagacacgatggcgaagtctccggtgcaaagttcatgctgggaaaacgaacgaagtgccttccgtctgctacgttaaaggtacgaacacttcaactggcaaaaactgcgacgactttttcggacctgaaccgtgttccttcggcacgagtgagcgacgagaagtgcgggagctggtctggcgggggatacccatgtctcgtcgagccgagttgtattcacagatgagcggggtgtctacgactcagcaccaattcccgcgaaactacttcttgggcctaactcatcgactcgaagacccggcggatgcggtgcattctggagcgaagaactcgcgcttcgcagtcgccaagaagcagatccaagtggacttgaagcgcacttttgctggtaatgacgagtgctggctcacgtcggatgcagggcagaagtcgctacagcgcgtgctactcgcctatgcgctgcacaatgacgatctgggctactgccagtccatgacgtttgtcgtggggcgtctgctgtgtctgttccacagccaaagttgcgatggtgaggctgaactaccgattcaagacgaggaacgcgtgttctggctccttcacgtgctctgcgaggacttcttcccgtcctactacacgcagggaatgactgggttgcaggtggacggcgccgtgctggaaaagctcatgcggatgcggctcccgaagttgtaccggcacttccagcagctgcacacgcctccgatgggacttgtactcgtaacacaatggctgctgccgctctgctgcgccgtcttccccagcgagacgacgttccggttcctggatgtgctcttctacgagggatcctcggttgtgtttgcagtggcgatcgcgctgctacgcgtctcacagcacgaactgctggccgagaatgtggactacacgcagcttttccgctttctccgcgcccgagaccagcgccttcacgacgcaccattgctgatggaggtggcgtttgaagagcaccagctactcgcgcctcaaatcgggtctctacgacagcaagcggctcgagaactaggcatcgaccaggaccagcaaacgtcaaagcccgcacgcgccaagaagatgtccaagcttccagtcgacgagttgagaccgggagacgtcgacatcagcatctgagaccccgcgaacttctacaggaattcaatgtttattagcacaatactgcaacaaccgtgccttttactcggccagcgtggccgttgtagcggcctggatggcagctttgaccgtcgtctcgcgctcgtcaccgctgccgctgctctccccgtcactagatgatgcgttcgtgtcggaagtgtcagccgtgatgtcgctgccgtcgtcgctgggagctgtggtcgcagccaacgccttggccttggctttcttctccttcttctccttctccctctcctctctgcgctccttcttctgctcctgcacgcggtcgatcgtctgcagcaacgtcgtcatgatgtggacggtctcctgcgggttcgagatccagatcgtcgtggccgcgtctcgcgagcgcgtgtcgttgcctgtcctagtgaagcggtcgcccacgtggagacactcctggccctggatgttgcgcagctcctcgctgtcgcgcagctccttgggcaggaaccggaagacgtacttctgcagcgcctggatgcccagcgccttgtggccaatgtccacccacacgtcgttgcctccgttgaacgcgcagaagggcacgctgaagtgccgcagctcgtgctgcagcgtgaggctgatctcctcgaggttctcgtacagaatgcgcttgtccgacgtgttgatgatgccgatggcgcgctccttgcgcaggatcttggccgacaggtgcagcgtcttgaccgtctcctccagcaccttctcggccgcgtccagcagcgccgtgacctcgtgctcgggccagcgctcgccgcgtccgtccttccagacggcgccgtcgatctcgcgcagccccacgacgcccgagaccttgtccgtgtacgtctcgaagaggtagttgcactctccgcccatgaccaggaagcgcgcacgctcctccatcgtgagctgctcgagcgcgtccaggatgccgcgcagccgctgctcgtagcgccccgggttgcccgggtacccggcggccgtcacgagggacacgacgacgccccggcgcagcagctcgacgatgatccgcaccatcctggacgccttgctgatgctgccgccgtcctcgtagatggtgtcgtcggcgtcgaacgtcacgagcttgagcttgccggcgatggcgttggtcgtggccaggttcaaaatgtggcgcacctccttgaacgtgggcggcacgcgcttgcgcgccaggaagtgcgtgcgcgcgtcgtactcgagcgcggcgcgcgtgaggtccagcggcaggaagatcttcttgagcttgggcaggaacttgagcaggcggctgcgctgcgggctctcgacgtgctcggcgatgagctcgctcatgaagcggaagacctcgagcaccgacacgcgcagctccgcgccgtcgtccacgggcgacatgatccactcgcgcagcagctcgatcatcgggtcctgctccttcagcatggtgtattggcgggcgtgggctcttggtcctggcctggtactggtctaggcggtgaggtctggtgggtgaattcggaagtgagctgagccttgtgccccattttttgcggctgaatgcgaatcgtgggaccatttttggtcaattggtggtcccgtcagtattctcacttggcgtttgtatggagcactgaagcggggaaagatgggccgcgcaacgtcaccctgcaacgtcatacgctagctgttgatggcccagatgtggcccgatcggccatcatatctatcatagtctccgataccccctacagctctggcaatgctgccgctccgagcactgcaagtgtctggatagccccccgcgtcaagctgcccgtggtggatcttctcagcgtttttgcttctcttctcggctctctgcttctcgtccagtcgcgactcgcgacgaccgccggcaacgcctgcaccgttgaagcgttgaccaaagagcagagcgtgctgttgtcgccgtggattctcgccacgaacattcgagagtagagagctgctgcttcgcaccgaactcggcgcctattttgaggcgatggccccgacgttccacgcccgccacgctggacgcgaaccgcgaagcgacgcgaagcgcgcctaaagctggtcgactggaggccgcatggcgttcaagctgaccccgaccgagagcctgcgcgcgtgcggcgtgctggaggagtcgctggagaagatgagcttcctgggcagcatcacgcccgacatcctgcagcaccgcgaggagctgtcgcaggtcgtgggcgaggagatctcgcgcatcatccaggagcagcgccagctcgagggcaagtacgagaagctcatcgcccagcgcgcggtgctcaaagggctggccaacaagtccaagttcaaggagaaccagcgcgagatccaggaggtcagtcgcctgctgcgcgagtccaccaagagcctgtgccgcaatctcaaggagaaccccaactttgccgggaacctgctcaagatccagcaggagcgcgaaggtttgctggagctgctcggccatacgctgacggagatgaagaagcacggcacgttcgagacgctgctgacgttcgtggccgacggcaagagcacgcaggagaaggcccacgagatcctcaaaaaggagcgagaagcagtcgacgaggtcaagaggctcggggcggaactagcgagggagaagctcgagcaccagaaggaggtggcggagcacaaggccgcgatcctccgcctcaaggagcagatcctcgctgtcaagtccaagacgcagatcgacatccgctacgcgcggaacgaggccaaggccaagcgcagcagcacggctcgaatgtaccaccagctgatggaggagcagcacgaccgaatcaaggatctgcagggcaagtgctcgaccgagaccaaggtgcacgacgagactgtgcactttctcaaggaccgtcacgagcaacttcagaccgagctggccgaatggaacgctaagtatcaacaggacacgcaggcaaagcaggcacaactgcgagagctacaggaacggaaggccgcgaacgctctgagactggagaatttccagaagaggtggcagcaagagatgaccaccattaagcagaaagaggaggagcgtcagcggctgctggagctcgaggcactgcgcaaggaagagctcaaggctcagaatacggctgcgaggatcatccaggtcgcctaccgcgcgtacatggctaagaaagaggagaagcgcaaagctactgaatccgagaagaaggcagggaagaaaggaggcaagaagaagggcaaaaagtagcgtacactatcggcaaatacgagctcagtacaactttataattctaacgcgtttgcgagtatggaagttgtcgctggattttgtacttccatcgtcctcggtcagaattggaaccagcttaagtttaggaatcttatagcagctcattctgcgaggaatctctcttgccatggtgctcggtagtattccacgttgatgcgatgccagttcctcaattcgctgatcagtaccaagtgcgcacactgcgatgccgagtgataagcaattcctgttgtggtccctcccgctggcactggtggcgtttctggcgggtcctctggctgtgctgcactccttcgacttgatagcgccaactccagcaacgaataatgcaccgccaatcgacaccagcgactttggattagtcgcaaacaacagtgctgctgccagtttacccgacaccattccgctcatgttcgaggtggcgaaatacccggcaatcggtcgccaaacgctagaagtgcaccacctccgcttgctgaacttgacgtcatttgccgagatggtgagtcgatcagcagacgagagggctccatcgactgcgatcgtcgggtatttgtcaatgactgaggtcttgaggcacaagaagagaaaccctggaagctaccccgtcggcgatctgcttctcgtgactgatgtccacttcactggcttcgacgatgaaactggagagcgcgagtcgttgatccttgaaacccagcgagttcgacgcttccgactcaagaacgtgcagtacgacgaatccactgagctgctctttggccaagtagagtggatcggagagcagtcagcatagcaatttgtagagcccattactccaattaatccttttatcttagagcaggaaggtgtccattacgtggtggacgacgtcgatacccgagtccaagggcttgtctgggtttgctcgcttggcaataatgtgctcatgcgagaagatgcctccaaacaggacatcaatgcggcgccaccccacgctctgcactgagagcagcatgccacgcagctcgtcttgctcgacgtcggcagtgaaggcgtacggcagttggtccaatatcacgtcgcctgcctcgaacggctctggtcgtgtgtcggctgaatgctttgacggcgcactgccgacagttttcccacgatgacgatggaaatggtgtttgcgtctgccactgtcgctggagtgcgaagtcttcctgccagggtcggacgcgtggcgccgattgcttctactgctgcttggagtgctgctggtgttactgatgccgctgccttcgacatcttggccactgctcgactgctcctcgtcatttgagggagaagaagcagccgcgtgattcggcgtcatgtacttgagggcgagacgcttgaccttgagcggaatcgtgtcgcgcagcttgcgtgcgctcttcagcgagtcgaacgcgatgtgggtgtatatcggcgacatcaggaactccctcccgctcaagcggtacggattgaacgcgcgtacagcggcgcacgtgtacggcacctgcatgtcgaagaagatgctcgagtacagcgtgcgcgccttgaacatttgtagcgcctgcatgaactgaccccgcgtcaagcagctgagcagagggggcgcagtggattcaccgtgcttgctcttcttgacactctcaccagacgtcacgcagcgcacaccaaagctcgtgttactaagcgccacgagccatctccagtcacgctgaacgtcttcctctgggatgcgaagcacgcaaaggttcgtctcaattggcgttgcgccggaagactcggcagtccaacggatctggatgtcgaagttgccgaagtcgtcggtcttctcgtcttcaccgttttgcccccatccgatgaagctggagtagtagctggcgtcgtcgtcaatcttcttcccattggggagcagtacctttacgtctgcgcacgagagatcaacctcgaacttcaacttgctcgcaacgccgtcctctttgttcgcgaacacttgcagcttccgatcactgagagcgcagtcgtacagctcgaatgcttcttgatcatggtgtgtcttcgcaccacctgggaggctgacaagcagcggccccttcacatccgaccaagctgcacaacaccgtcacagtcagctcgatatccccaagcaaataacagctcccttaggttgccgtacctggatggaagtccttgtccataaacgccctggacgcattgctcagctcctgtgtttcttccgttgcctcgtcattcagagtcaactgggcccccgtcctgctgaagatcttgggcatcagcgcattgaacacgacgttggtcgcgccgcgccgaggtcgccggattccgaggtgcggcgtcgccagcgtcacgaagttctgcaccgcgtccaataaaccacaaacaaaccggtaagtcaacctacactcctacagctatctatacgtcgtctgcaccctaccatcggctctactttgtcgaagaacccgcggaccagcagcagcccgatgcagtagcggttgtagagtccgccgagcgagtggccgatcatcgagagcttctgcagcttaggcatcttcgcggccagctgctggatctcgtcggccagccgctcgccgccctggtccacgccgtcgtacgtctggaagaagctcgcaccgttgctctcgcccgcgtgcaggtacagctcgtccgcctggaactgcgcgcggaagatctccacgaagcgcgcgaagtcgtgcttgctgcccaacagcccgtgctgcagcaccaccaggtgcgtggcgcgctgcagctgcgcggcgtcttcgtgggtgtcgcggcgaggcgagcgcatcgtgctgtgggctccgaggagaattgaggaatgacgcacttgggcttccgcgtagctcctggtttgattatggcgcgggtgcagccattttctcagcgtgaaccgcgattggctaaatagatgaaaatccatttcctgcgacgtgtgacgaggtcaattgtgcatgttttggtgttgatgccgatgggcatttggccgctgccggtgcggtaaacatcgctgcagggcgaatcgccctggacgatctatggagagcgaacgagtattggctggcgactacgaggcattatcctggccagtggcggtctggacgtgcatctgcgcctgtcgtggacgttagttgaagtgcccaacagttaagaggatgaagtacagctcattcattggatatgctggtctactcttcactacgaggcagcttgcaccactcgacaccgaagaatgcggagacgtcgaacgtaggatcggtcggatcgatgtcgtccaggcggcttgtgagcttgcggtagcggagagccttgcgcgctatttgactgttgctggagttggtgtcggcgccctgcagcacggagtctagcaactgctgagctttcgcgcagtagcgagagcgctggtcttcgtccttgtatagcagacgcacccggggcctcacgagggaattgcaagtatggtcgaggtcctcgtcccacgagaatcgtccgtcttgtgatgtttcgggtgtcctccgtccttttgatacagcgcaataggaaatacctccgctgtattggtagcgcaggcgagacgttcgtatcgggcttgaagccatgaaggggggttgttcttctaccgagtagaatggaaaatgacgaaacgcggctggaacacaacgacgaccagttggaagcgagtactcactcgcacgtacctgaagtccagagaggctctggtcgctcctaagagaccagtagtggcttcgtcagagtaacgtatactttgctggtcgtgcactgctcctggtagggatatttgtgttatctgccctgaatctacaagttactcgtcgctaagaacattgtgggcaatcgctatacagctactgtagttatcaatggtcagttaatagctacactcgtctggtagtttatgagcatccagcatcatcaagctggtcttgagcaccggtggtagacatctatgaactagtgtgtgtggaacgtaaattcgtttttgttcacataacggagctttgattggtggaacatgatatcaacttcaacttgtagatgcacctatgtgtctctagcgctgctggtggttgacgaagcgcatggccaacgctgtgagcgctcgaaagacgagcaggatggccacgaagacgccaatgtactctccaatgcgctcgtgcttgactccgaagacctcgtccacgtatagcttgactgggatctcgcccacgctcgcaggcgcgttctgcacgactcgacagcccaacgggtagctcgagaggtccagcgcgctggtgttatcagcgctggccagcgcgatctcgccgagttgcgcgtccgagcagtcgccgaagacgatggccaccagcacggagaagctgtagcggtgcggacagacgtcgtagatccacttgtagcccgccgggatctgcagcgccggagggttgaagcccgtgagcatgagcccgaacgcgttgatcatgacgccgaggatggtcgcgagctccatggtcggggacgagaacatggccagctgcgccaggtacgcctcgaacaggatcagcagcgcgaggttgacccagtagagtgcggcctcggccaggcctccgagccccaccatggggtagtacacgaccgtgaagagcagcgcgccagccaacacgtacgggatctccacgaggctgaagctcaggaagaaccacacgctgttgtaggcctgcgccgcgcgctcgcggtaaagaccgaccgctcctcgtacaccagcggaagtccgctcatgaaggacaccagcgcgacgaacatggtggacaggtagaccatgccgaggccgctgttgatgccctggtacgtgtcgtactcggcgcccaggtagacgaagccaaagatgaagcccagcagcagcgagatgccgaggcgcgtcaggttgtacgacggcgtgcgccagtacgtggtgaagaagcgccgcagcaggaagcgcagttgcgtggcgttgccggccgcgcgcttgcccgcgtagttcaggggctgcagctccgtcgacggctggaagagccccgactccgcgagtttggcgtccagaagcgccttgttggagctcgcgttgaagactgacacaaagtcggtggtgacgctatccccgcctgctggggtccgtttggcgtagtggctacgcttgggtcggccttgcggtggctgtcgacaccggctccgatcacttccagcatccacgtggccgggttgtagcctttctcgatgcgagggacactcgggatggcctcaaagtaccggactatcgagctgcccccacgccctaattcaccaaagtacaccgtctcaccccctcgtttgagcagcagcaagctgtcgaagagagagaagacgtccgacgacggctggtggatcgtgcacagcacggttcgtcccgagtcggccactcgacgcacgccgcccatgatcaacttggcggagcgcgcgtccaggccgctggtcggctcgtccaggaacagcacgctcggctgcgcagccatctcgacgccgatcgcgaggcgcttcatcttctccatggagctggcacggatgatgtggtcggcgacgtcgtcaagcccgagcagctccagacactcgtccaccgtgtcgtacttgacgctgtcggggactgtagcgtcctggcggagaaacgccgagaacgttagcgcctcgcggaacgtcgaagcggtggagtggacgtcggtctgctcgcagtacccggtgcagcggcggatgctcaagtcggtggccgggaacccgttgagcaggatatcgcccttgatgatgcctgccgtcttccgacccgcgatcacgtccatgagcgtggttttgccagctccagtggatcccatgagcgctgtcatcgtccctggcaaggcgtatccggtgatccccttgagcaagtcgacgttcttcgcaggctggcctcgaccgccaggcaccgagacggtgtgccacaagtctttgaacgcgacgaccacgggcggaatcttgatttggtgcgtcgaagtcttcatattgacaacgacgtcatcatcgccaataccaagctcgttctcgggtttactcgcgtgcggtgaagctagcaaattgtacgctgcttccgctggcacctcgtccacagactcgtcgtgaggcagtgccacattttcgggccgctcgtagcggtgatactccagaacgaagtacgagatcgtcatgatcgcggcgtacgtcgcgaccaagtagacgacgccgtagaccacccacgtcttgtcggagggcacatcgaacagaccgagcgagtactcgcccatggtgtggccgtaggtcgagcagtagtccacgcccttgtagacgcggacgtcgagcttgctgctgcgatactgactcactgcaatgctgcgcacaggccacgccacggggtcgagccaatagagccacgtcaacctgtccgggtttggcaatgttgagattcggtgacactgccgccaacaggaagtacatggctgcgaacactaagatggtgagagtgaggaagaactcgaagaggaggaacgcccccacctcgtgcaccaaacctccaagccaatacaccagcgacccgaagatgagactcaccgctagggccagcggaatctggatcagcgagcacgcgagtacatatgcagcggtgcggtagaagttggcggttcgctgcttgtagaagacactacgcgcgtcgtagaatacgacgaggtttgcgtcttgaccgagaccaagaaagagggacgccgcgaagatgacgcccatcgagacttgagcgtccgccagatccatctgaagaagagacttccgaaaatgaggccgacgatgagaacgagagtgagtcggccttttacgaacgcgtcgttgcgcttgctcagaatggcttcacgcttcagaagcgtccgcaaactggccaggagactctgctggaactccggtacgtcggccatgcacctcctcgtgacgttgctgtggtcgttcacttgtcaatcttgtgcgtccgcttcggcttctcgttgctggaagagtggtggcttcatccagcggtccgcgtactcgtgagcagtgcgtggaggtgcgatacgacctggaatcgactgcacggactcgtacacgctttggtcgggagtagcgagttcacagaggaagtcggcgatgtctttcccagacggacagactaaccccagcgacgcgaagtaatccttcgccgatgctgtgggtccgtgatacaagattcgtccctcattcatcaggagaacgtcgtcaaaagtgcgaatatctcgggcgaaggctgaagcagtgaaatgaccacagttcggttcagtgtcttgccgatacttcgttgagccgcaacaatgtcgaaggtggcggcgctatcgagccccgtgctgatttcgtccatgagcgacacgtacttgacaccgaactccatctcgcccgttgtcgttcgtcgcttctctccgcccgagatgccgcgatacatggcgttgcctacgatggtgttctggcacgattcaagaccgagagaccgcaggacgatgtcggggaagtgatgaatgacgctgcgtgccgccttaaccgccagtccgttctcttccggtgatccatgaatgagttgccgctccaggtctcgctgagctcggccccgcagcattcgtgcgcgaactcgaacgtctcgcgcacggtcaaagtgggcagatgcgtgtcggtttgggtcacgtagccgacaaactggggcaacctcttcaagagaacctcgcgagggaccccgtcgtactcgatctcgccctcaagattgatctctttgtccaaggggaagcgcccactaagcagcttcatgagcgccgacttgcccgacccggattgcccgagcacgagcgtgatagtcccggggcgaaatgatcccgtgacgtcgcgcagaatgtgcttgcgcaccgtgtgcttcttggcggagatggccgcgacggatttcatgacttggttggtgagcgttgggagttcgcgttgcgcgttggcaatgtgagagtccgtgggctggaggctaacgagatcggccgacagcgacacgtgcttgaaccgagtgcccattcgcgggaaggagtcgccgagcgcggtctcaactttgccggcgatgtcttggtggaacttggtgggcccaagcgccagcatgtccttcccggaggagtacacaacttcgggcgccatcgttgccatcgcgtgtgtatccctcactggccgtttgttgataagttggtgctggtggtgcttgcggattgaaaagtgaacgcctagggcaacgaccgatgagtaccgcaaagtgtcaaaccaaccgattgcggtttgctgcgtgaggcgtaacactgcgcgatgacgacccggcaaaggatcgacggggggggcaaggaaactgaagtccgttgcagatactgtgcaaatcttcagcgctgattctcgcaccgcaccgctgccataatagtcgcgcaatctctatacacagcatttgcagcgttgccagattgaaaagtgagctcaacgaccttatcctccaacacacacgcagcatgtaagttatgtacctgtacagggccatttggcttgcttggttgtagagtttgttgttgatacctcataccgtccgacattaggctgctggtacctgcccacgtgtgctacacgcgtaacgaataacaccatgataaacacgagacgagaacttctactttttcaccggtacctcatcttccactctactgctgtttggactcggtggctgccgtgtctacaacggttgcccctccggtggtgtctggtgctgccttccctagcatttccgctgcagcggcagcaggcgactccgtgtgcgcgattcggggcttaagcccgatgcgccggcggaagttgttgttgtccatcgcgatggtctgagccatcgacgaccacgacgcccccagccagtagaagaacacaccctgcggcagattcgccatgagcgggatggcaaagatagtgccgtattgcccgaactggagaacctgcgtccagaaagaactcttcttgcggatggagagttccaggttgccgtacgtcgatgccgctgcgatgataggtaggatatacgtgctatccgtctccatcaggtttttccagaagagcagtccgcccgaatcgaagcccgcaaagttgccggagcgcaccatgtcgcgcgcgctgtacgccatgaggacgaagatggggatgtaagcaacagagcccatgaccgtctgcacgggccgcgtgttgtacttcttcgtcacagccttgacgcctttccttccgagtaagatggcgtcaagatgtcccttgtggtccgaaccaggctgcaccacaacatcatcgtcaagtcagatcaatgcaccacagctacagcaacaataaattcgccaaaattccacctaccgtgaacgtacgcgcgtacttgtaggccgagtacagcttgctaaagtccggctttgcctgaaccagcctatgatcaccaaacaaaatcacttcacttgagtgcactgtacacctctataattgccagtctaaaagctgtttgcacctctgcatggcctggatctggaacacgtagaacgggaagatggcggcgcgcaccgtcacacccgagagctgcagacaacgcacacagcacagcacagcaccacagcattagccttcttccacctctcatcagtcggccaataaacctccgtcctaccatgagcgtcgcccaccagggcagccccgtggtggtgtgcaccgcctccagcaccgactgcacgccctgcacgatggcccacggctcgccgcccgtgccgctgccagtgaccgcagctgccacgtctgcaaatgtatacgctccagcatcagtatctgctgtcacttagtgagtaaacgcattggagacgcacctgtgagctgtccgtcggccatcgtcagctccagcgtcggcggcgccgcatcagaggtggagaagtggcggttgtcgagcgacagcggcactcccagcgccgggaaagcggcctgcacgctgcccagacgcagcgggtgctgggctccagatagcggcgtgcggcgcagcccctgcgccccgcgacgcagcgccccgagcgctcgttgctgtccgctcatcgtcggcggcgtcaagtgcgctttgctttgcggtcgccgctcattgagacgctcgattggacaaaatgagtccaatttctaccaattgaataaccatctaacaccggtagaataccgatttaccggttttcacgacggatctttgaagtgacgttgacgtgaacctgcttcaactacggcgcgtgacatcactccccgatccttcgtcgcgatgctacccaagcgctgctccccctcgctgctgcggacgccgctcgcgcgcgccaagagcacggccaagccgcgcacggcgcccgtgctgagcaccatgctgccgcgcggcacgttcgacggcaaggtggcgctggtcacgggcggcggcacggggctgggcaagggcatcgccaccaagctgtcggacctgggcgccaccgtggccatcatgagccgcaagcgcggcgtcgtggaggtggcggccaaggagatccaggcgctcacgggcaacagcgtgatcccgctcacgggcgacgtgcgcgacgccgagcaggtcaagcaggcgctggacgagctggacgagctcgcgggcgtgcccacggtcgtggtcaacaacgcggcgggcaacttcatctcgcccttcgagcggctcaacgccaagggcttcggtaccatcgtggacatcgtgctcaagggcacggccaacgtgacgctggacgcgggcaagcgcatgatccagcacgaaaagggcggcgtcttcctcaacatcaccaccacgtacgccgagacgggctcgggctacgtcgtgccctccgctgcggccaaggctggcgtcagcgtacgttgctgcccgtgactgcagttgggggctttagtattcgagctaaactattgttgttgcggttgctgcaggccatgatcaagtcgctggcggtggagtggggcaagtacggcatccgcttcgtgggcatcgcgccgggtccgatcaagaccaagggcgcgttcgaccgcctggacccctcgggcgccttcgaggaggtcatgctgcagaacaacccgctcaagcgcttcggcgaggtggacgagctggccaacctggcgtcctacatgacgagcgactacgccagctggctcaacggcgagatcatccgcttcgacggcggtgagacggtctcgaacgccggcgagttcaacatgtttggctccgtgtccaaggagaagtgggacgacctggaggccaccatccgcgattccaacgccaagagcaagaagtagtgtcgacaacacacaacttgaatgatgccgctccgacagcgtctcgctacttatattgatactacatccagaaaaactaaagaaacacctgccttcccattgaatcggtgtcgagcacatgttgaacgttcgtttaccagctcttctgcgatgaaatgagatgaaaagcttcaagtagagtgagtaggtggattatatacagatcaaggttctcctctgatgaaacacgaataaagtaggtaaaccgatcgagcgctgcttcctttgcttgcttgtgtacgtcactgggcgctcgatccgatcccgctcatagattacgacgctgccgttgcgaggtggtacttggcccggagctgctcgcgcttctcggcgcggcggcgcatgcggtcttcctggaacgtggcgcggcgctcctccatcttctgcaggttctccgacatcttgcggatctcttcgttctccttctcgacctgcttcgcgcgcttctcgcgctctgcggccagcatggctccgcgcacctggcgcgcgcctgcgatggcctctacccactgctgcctcttgagcgccgtagtggcgtcgaacctgtgctcctgcgggcccacggcgatgacgatgcccacgtcggcgttgtcctgacccgcgtccacctcgcgcacgtccgtgatgtcgtcgagcgagatggccttgatgtcgccctcgtagctcctcgactcggggtcgaacttctggtactgcaggatgttcttggcgcgcacgaacttgaggtgcacgtgccgcttgcgcagcagcccgtacttgctgaagaggtcgccgccctcgagcagcggcaggaacttctcgtagaagacgttctcggtctgcgccgtgcccgcgcagttgttgcagagccgcacgggctccacgaagccgaacttgaccacgcggtcgaagtgcgccgtgcagcggccgcagaacacgagcccgcagccgcggcagtggtgcttgcgcttgagcaggtcgaactcgacgccgcacagcacgcacgcctcgatgaagtcgtccttgacccaccgcggcggctcctggtagttggggaggatggcgtcggccgggctctcggcgtccgcgggcgatcggcgcttgggcttctcctgcagcatgtaccgcgcctcgtccgtgggctcgggcgtgtgcgccggctggaagcagcacgctaccagcgcgcacagacccgccttggccttctgcgggaacgtggccaccatggctgtaggagctggagggggctggtagtcggaactgggagctggcagaggtggcgatacacgcgcacgtatggcgttctgcgctccgcctgttcaggtctgtcagatgaaggtaccctatgcaaaaagtatcgaatgatacacatcggacttagcggagggaaccttccctttgtgtgcctttgccatgactgcctatttactgcaggacgctcgcaatgtgccgatagacggcgggatctggccaactatggaggcgaaaggtgacggtggcaccagaggaagcgatgctgcggagctggtgctcgacctctattataggaataagagtgtctcggtcggaatcgaccgctgatccgatggattgaacgcttgaaattgcatccaacgcccaggctgtcgcagccaccccgctgtcttacccactgccgatggtgctgtacaaagctggacttggatcggtggaaatgtacgtgtgcaaaagtgagcccagcgtaaaccgggagattacctttgaagcgctcaaatggggcgttgaagggtgaggcccgccgcggttaagcagctcctggcccgccgacattgagttcattctccaatttgccagccagccagtctcgcctgactctcaattcacagcacaactccacctcactatggtcgccaagggaacccgcgctgccaaggggctgatcaacctctgggccaccgaccgcggcacctttcccgtcgtgatgctagtgggcttcgccatgaccgctgcgctcggcaactgcgtccggcatctcatgagcaacccggacgtgtgcgtgaccaaggccaagcgcgacaactttctgcactacaacgaggagcagggcgccgagtggcagtccaagcgccgcaacctcgccaacctccagaagaacgtgatcaaccagactttcgagaacgagggtgacaagtaagtttaaggatcaactggacgcgtgcaggcaattaatacacgtcagtgggtttgtctcgatagcaacgcgtgcctgcagtaagttacttactgtgcgtacttacttttgctgcgaatcacatcgatctcggtcttgctgtagcaatcggccgctgagcaactacatgaacatggagacttgggactgtcaagctgtcgtgcacgttggcgcaggagggttcttttccggtgggcaccgaaatgactcagcacttatgcgttgtgcttgtgcgtacttaaccaagcgtaaagcaaggctaccaagcgtaaactgcaagtttgtgctcccgagttgcaattcctgagcttgtcgttgacggccccagtacgtgacagcgcacggtcaggcgcttgtgccggcggtcaggctcgtgtcagtcgtctgcaacaagcaatgcgtcttcgccttcaatactaaacttacgcgtcaggatttgaatgcagtgtcaaacggttctcgcccgaagctcattgtgcaagttgccagcttcaggcgaaactcgtcccactccgcctcacaaccaagcctcagctcataatggccgtcaatggagcccgtgctgccaagtgagttctcgatctctgggtcaccgaccgcggcaccttccccgtcattctgctctgcggcgtggccatgaccgccgccatcggcaatgacttccgacaccttatgaagaattcagacgtgtgcgtgagcaaggacaaacgcaactcgctgcgctacagcgaggagcaaggcaccgagtggcaggccaagcgctgcctcgccaaatctccaggacaacgtgattaaccagacctttgcgcacgaggccgccaggaaatgaagccggtgtagatccagcattgagtcgtcttgaaatgagaaccatcaaatacatgtcgttgttgttttacttcaaaaaccattaggcttgccgtagaaggcgtcttgctgctgggcatgtcgaactaaattcaaggttgaaaacgagttagggtcgaccgccgccgtgtgatcatagctcgcccgctgcagttgaattatcctcgaggtctcgaaccgcgcaatgttcagtttgacctgcgaagtcactgtggccgacctgtcacagccacaaccttttgccaatttgtcagtcaccaatgacgcataatctgccgggtcatcaatcacggttctcgcgctttctaaagggtgagaggatgctggagtcgtccgagctcactcggcaatttgccagcttctgagcactcgcatcaacttcactccacgcctacagcagcaggacttcactccatcgactcgcaatggtcgtcgccaagggaacgcgcgctgctaagggcttgctcagcctctggtccaccgacagcagcaccttccccgtcgtgttcctcgtcggcatcgccatgacggccgccatcggcatcggcgctcgctacctcatgaacaacccggacgtaggtccaagcgcaacaactttatgcattacaacgaggaccagggctcggactggcgggctcggcgcttccgcttcgccaacatcaagaagaacgcgatcaaccagtcgcgccagttcgaccccgccttcgagaaggaggagaacaagagcgtccacagagactaggatgcgggtgagcctggaaggcgacacccaccctgccaatatacgtattatgtagtcgttcaccatttatccatgacctcgctcgccttctcacgttatgcttcatgcaatagcggccgacagtcctacccaagagcgggtagacacgcggccaattcctgaacaataccatacaaagcagcagcgatcgctggccccacattttcctaggatacgcttatttagatgtatgacttctgctgtgcttgctccccagtcccaagcttctggcttaaacattttccagttatatcgctgtttctgtcgatccgcactaacaaccaagctacacggcaacaccaaggcaaccaccaccaactcgactcggtagctcttccgcaccgtagaccaacttcaactatccagtagttctatgtgggacacaccaccctgtcctaagaatggctacatctcatgtgctctgagcgagcagccacgtaaagagtattgaggtggaccatgccgcagctcaaggaggaggaggaggaggagcgcacgtcgacgacgaccgtgacggaggacgaggaggagatggagcacatggacgagcactcgtcgctgcggcagggcgcgcagggcgacgatcactcgccgccctccagcgtgcagacccagctcaagaagcccaagaagttggcgcccgacgccacgagcgacaaggcgaatggcacgttgcggcagggctcggcgcctcggctgctgtccaccgagagtgtgggactcatctcgcagtacgcggccgtggggctcgtctacggcgtgctgcccagcaccatcacgcccttcctcacgtactacctcaacatggagggcacggccaccacgtcggcgcgcgcgctgatctccatcccctggagcttcaaggtcttcatcggcgtgctgtccgactgcgtgccgctcttcgggtaccggcgccggccctacatggtgctgggctggtccgtcacggtgctgtgtctgctggccatggcggcgtcgccgctggaggagccgtacttccccgacccggagctgaggaacgtcaagcccgcggactactccatcgagatggcgcagtcgctcaacaagagcgcgcccagcagcggcgccaagtacattgtgctcatgatgttcgccacgctcggatatctcttcgccgacgtggcagcggacgcggtggtggtcgagtacgcccagcgagagcccgaggagacgcgcggacgcacccagacggcgatttacacggtgcgaacgctgttcaacgtcgtggcgcaggccatcacgggcttcggactcagcacgccggactacggcggcagttttgacttcggcatctcgttcccggacacgatgctgctcctggcggtgttttgtctgccggtgatccccatgacgtggatgtttgtgcgtgaggagcgtgtgaaggaccagccgacgttcaggaagtacattggggacttgtggggtgccatccagagtcgcgcggtgtaccaggtgatcgcgtacagcttcttgtcgggcgtgttcagcgggttcacgtacgtggcgcaggaccccatgacgtcgtactgggtgcacgccacgagtttcaacctgagtctgagcagcatcttcggcagctttgtgacagtggtcacgctcacgctgacaggcaagtacggcctgcactggaactggcggacgatgcaagtggtcacgatggtgagtgtgatcgcgctcgacgccatgtgcaccatgctggtgacgtgggacatcgtgcggaagcagtggttctggctgggcgtcccgatcgtcgaggccgtgccgaacgccgtggggttcatcatctcgacgtacgtcgtggtcgagctcgctggccagggcaacgaaggagcgatctacggtctgctgaccacggtgagcaacctgggcggaccgttcgcgctcacgctgacgaagaacgtgaatgcggcgttcatggtctacaacgaagacatcctgaacgacacgctggaggtgcgtcgcgacgtgaccatcacgatcctgatctcgtacgtgatgaagctgctggcgctgctcttcctgccgctgctgcctcgccagaaggccgaggcgcaggcgctcaagagatcaggcggcagcagtcgacgcatgggcgccttcacgatcgcgtatctatcgttcgcgctcgtgtgggcgattttgaccaacctgctgggcatcttcgagagcactcggtgctgggtcatcaccgggggctgtaaagagtaagcaatgatgtctcgggggcaccagcgacaacagggatatgtatgtgtagccatcaaagagaagcaaatgaaaggataaacaagcagaactgtggatcaaaaccgaataaatgtatgtggtgtgtgtgacttgtagaccgacagctacgcgctgtagaccgaagagagaaaggccgcttatctggagacgttcttgttctcctccttggcgaaggccgggtcgaactggcgcgactggttgatggcgttgcggtggatgttggcgaagcggaagcgacgcgcgcgccagcccgcgccgtcctcggtctggtagtgcatggagctgttgcgtttgctcttgtcgaagcacacgtccgggttgtgcagcaggtagcggctggccgaggcgcccgcggccacggcggcgaagctgcagatgatgacgaccgggaaggtgccgctgtccgtggtccagagcttgaagaggcccatgctggagcgcgctgccttggcggacatgattggcggggtggtggtggtggtggtggtgggtgtctggagagactggaagtgctcgatgcagtgcaaaatgtgcaatgagctttggggcagtcggcttttggtgatccgattccttttccgacgatgttcaacgctcactgcaggttttcgctatagatacgcgattcggtgcgtgtctaagccaggatcagtgtcggtgatttgtgaagtaacaaaaattgtctcggcgataccgtcctgagcgataccataccggtttatagcggttccctgcgcatgtacttcaactagcggtgtgacgaaggctctctcgtcgttgacagcgctgcagactgcagactgcgtacttcggcttgcgctggaggggtctggaaggcaagagtagagccacttcggtggtcgttgctatcttcactccgttaaaagaatcgacgcgcctctttggagttaacgctagtcgagccttgttggcaaagacatgccggggctacatgtaaattgtgtttcccaacgatgcgaattgccgaaacacggctgtgcgtgatctctatctcctgaacacgcacaaactcggccccggccaacgaagtgaccgaagttctttcgtgcgggaaggcgacctgaagtgttgctgtgacttctcgcttttggttgacaggctgagcgcgtgtccatgccttatcatagaagcatcaccggaaccggatttgcgcttcacctcggcttggccattgcgggccgcttcagcacttccctgcaccgcatttccctgcgcgtcgaagacgacagccacgtctccgctaagattagactgacgaacactttgtagcaatagcgttggcgtggggtactgtacttctaaagcgctcttacacatccagaaatagcggtgttgctgagcagaccagacccctgcgcagctacagtactaatagaagtagtgcttggtgcggtctgccgtctgtctggttggttgtggttgccttctttcgccaatggacccccatcgatgcacacagggagggaaacgcgaggcacacggggatgaccgaccgtttccggatgccgttgcagacaccaccgcgcgccaccgctccacacccgcgcgaaccgatcggctcaaataccccgcagtcactatctcatgcaggtcccaaccaactgcatcttgactggtacacttctgtcaataaatatctaggtcaatgacaggtagctatggaagcgtttcaggctacccgccgctgacttgcgtcgagctgctgggctccaagcagggctggcaagcgctccacgccgctgctgctggaagtgcgccacagatacgcggttccgtcggtgccactctgaagtaacattggcagttgaataccggttcgtggacagttcagcgccattgttacttcagtgctcgaagaaacgcgtccgtgcgtatctctagacccgcctcgcgttcatacagtttgtatggggcgagtccggcgtaagttcttacagcgtgggcattcctcccgccgacacccgatctctgaagttaaacgcaaggccggccccgcgtatctcttgcgtcgccaacgtgtggccaggctgacggaggaggaagagggccttcatgggcgacggcacaacgggccgatagccccatagccccccaaaagctcattgcacattttgcactgcatcgagcacttccagtctctccagacacccaccaccaccaccaccaccaccccgccaatcatgtccgccaaggcagcgcgctccagcatgggcctcttcaagctctggaccacggacagcggcaccttcccggtcgtcatcatctgcagcttcgccgccgtggccgcgggcgcctcggccagccgctacctgctgcacaacccggacgtgtgcttcgacaagagcaaacgcaacagctccatgcactaccagaccgaggacggcgcgggctggcgcgcgcgtcgcttccgcttcgccaacatccaccgcaacgccatcaaccagtcgcgccagttcgacccggccttcgccaaggaggagaacaagaacgtctccagataagcgttgttgcagcgaggactatctacagtcagccagtctgtcgataactgaggcgggtgctgttgttcggcgctcgcttctgtaaacatgtactattttgcgagttatctcggttgttcgcgtttggatgcagatttcaaacttgtcatgttgcgtatgaattcatactactagtatagatacaaggggatactgtagtagttgctcctcgtggtgacttcagttgagcccgatgctgaacatggcgagctggtcctcttcgatttcctgctgctcctcgctgaggtccgcccaacccatcgagaggcagtagaatcgacggcgcagtgagcccagcacctgctggcggaagcggcagaaccacttgaacttgagcagcacaggcttgatcactgcagattgacggcgagcagtgtgggcaacgaacgcagcgcggcactcgtcaagcagcgttcggtggaagcgtcgccgtcgccaggtcagcgctcggagcgattccctgaacacggggtacaaccggatcacgaacttgtgacgcagtgtcagctcggcgttcgtgatcagctgacggaatcgcctcctccagacgaaccgacgcaaagtctcgcggaagaccgggcgggagttgttgacactgtgcagcagcgcggactgcctcagctcccagaagtcctcgcctgcagcgctccggaacgcgttgagccacgactcccagcagtcgaacatcgtcatgtcaaaggggtccactgggagcagcctccgccggtggagcctcttgatgcgcagctcgtccgtccagctcatgccgagtccgcacacacaccagacgctgctgcagccgtcgaccttgacgagcatcacgcggcaggagcggcactcgacgatgtcttcgtcgccgatctcttcctggtcctccgtctcgcacgggcacggcgcactcccgtcgcccagataccgtttgcagttgaagcaggcggagaagccgcagcagcgagtcacgacgcggcggtggacgctgtgatacgcaagcagcagcgtcgcgcgacgctcttcgtcctggatgagcgggagcaccttgtggacgatgcaatgggtcttggaggccgggaagttgtcggtgatgtggcggatcacatcgcgtgcagtggccgtctgacggtgtcgacagaattggcggacgacgcgccgaagctcagggatacaagccgcttcactcggtcgaagtgtaagagctacagcgttggcgaagtccagacggccgtccgtgtctgtgtgggagcccggtagctgcgtgtagtgcgggttatggcaacccggacacgtgaagctgcaggcagcgtcgcatcgctgcttgtactgccggagcaggggcatcgttgtcacggcgtcggggctcagccagcgagcccactgctgtctgttcacggggacgagacacacagggcagcggaccttgggcaacgccccagcgtacgggacgtgcatggccatttgcaggtgcttttcgaggcacggcgtgcagaagacggcggggcagaccgacgagcagaagcgcgtgacgggcttgagggttgtctggtccttcaacgtgagctcctccaggcagatctggcaggtcacagagctggaggcggtgcagattgcctcgcgagtgtccgactgcgcattaggaggcatggtagttggatgcggaccgcgaaatgtgaagtgaagagttctactgcaggcaggacgcaacaagtgtagccatctgacagttcagccgaccttcacccgtggttttcccagatggctactttcggagtgctggtccttgaagtgcgtgccagcagtgagcactttacctcttgtatcccccctcctagccctcggggttgataatcgcatggcccagagcgtgtagtaaagccgttgttgcacttagccagtctgttatcgcacgctacgagctgccaccggtgcagttaatacagtatcgcgaaacacagcttgtgcaatggaatgacccacataaaaacatccaaacgacaccaacataactcgcaaaatagtacatgtttacagaagcgagcgccgaacaacagcacccgcctcagttatcgacagactggctgactgtagatagtcctcgctgcaacaacgcttatctggagacgttcttgttctcctccttggcgaaggccgggtcgaactggcgcgactggttgatggcgttgcggtggatgttggcgaagcggaagcgacgcgcgcgccagcccgcgccgtcctcggtctggtagtgcatggagctgttgcgtttgctcttgtcgaagcacacgtccgggttgtgcagcaggtagcggctggccgaggcgcccgcggccacggcggcgaagctgcagatgatgacgaccgggaaggtgccgctgtccgtggtccagagcttgaagaggcccatgctggagcgcgctgccttggcggacatgattggcggggtggtggtggtggtggtggtgggtgtctggagagactggaagtgctcgatgcagtgcaaaatgtgcaatgagcttttggggggctatggggctatcggcccgttgtgccgtcgcccatgaaggccctcttcctcctccgtcagcctggccacacgttggcgacgcaagagatacgcggggccggccttgcgtttaacttcagagatcgggtgtcggcgggaggaatgcccacgctgtaagaacttacgccggactcgccccatacaaactgtatgaacgcgaggcgggtctagagatacgcacggacgcgtttcttcgagcactgaagtaacaatggcgctgaactgtccacgaaccggtattcaactgccaatgttacttcagagtggcaccgacggaaccgcgtatctgtggcgcacttccagcagcagcggcgtggagcgcttgccagccctgcttggagcccagcagctcgacgcaagtcagcggcgggtagcctgaaacgcttccatagctacctgtcattgacctagatatttattgacagaagtgtaccagtcaagatgcagttggttgggacctgcatgagatagtgactgcggggtatttgagccgatcggttcgcgcgggtgtggagcggtggcgcgcggtggtgtctgcaacggcatccggaaacggtcggtcatccccgtgtgcctcgcgtttccctccctgtgtgcatcgatgggggtccattggcgaaagaaggcaaccacaaccaaccagacagacggcagaccgcaccaagcactacttctattagtactgtagctgcgcaggggtctggtctgctcagcaacaccgctatttctggatgtgtaagagcgctttagaagtacagtaccccacgccaacgctattgctacaaagtgttcgtcagtctaatcttagcggagacgtggctgtcgtcttcgacgcgcagggaaatgcggtgcagggaagtgctgaagcggcccgcaatggccaagccgaggtgaagcgcaaatccggttccggtgatgcttctatgataaggcatggacacgcgctcagcctgtcaaccaaaagcgagaagtcacagcaacacttcaggtcgccttcccgcacgaaagaacttcggtcacttcgttggccggggccgagtttgtgcgtgttcaggagatagagatcacgcacagccgtgtttcggcaattcgcatcgttgggaaacacaatttacatgtagccccggcatgtctttgccaacaaggctcgactagcgttaactccaaagaggcgcgtcgattcttttaacggagtgaagatagcaacgaccaccgaagtggctctactcttgccttccagacccctccagcgcaagccgaagtacgcagtctgcagtctgcagcgctgtcaacgacgagagagccttcgtcacaccgctagttgaagtacatgcgcagggaaccgctataaaccggtatggtatcgctcaggacggtatcgccgagacaatttttgttacttcacaaatcaccgacactgatcctggcttagacacgcaccgaatcgcgtatctatagcgaaaacctgcagtgagcgttgaacatcgtcggaaaaggaatcggatcaccaaaagccgactgccccaaagctcattgcacattttgcactgcatcgagcacttccagtctctccagacacccaccaccaccaccaccaccaccccgccaatcatgtccgccaaggcagcgcgctccagcatgggcctcttcaagctctggaccacggacagcggcaccttcccggtcgtcatcatctgcagcttcgccgccgtggccgcgggcgcctcggccagccgctacctgctgcacaacccggacgtgtgcttcgacaagagcaaacgcaacagctccatgcactaccagaccgaggacggcgcgggctggcgcgcgcgtcgcttccgcttcgccaacatccaccgcaacgccatcaaccagtcgcgccagttcgacccggccttcgccaaggaggagaacaagaacgtctccagataagcgttgttgcagcgaggactatctacagtcagccagtctgtcgataactgaggcgggtgctgttgttcggcgctcgcttctgtaaacatgtactattttgcgagttatctcgcctttgtgagcttagaaacttttatcacttcaattacaacgagtggtactatgttatcgctgatccagcgctctcgctcacgcggatgaagagtagcctacagacgagttaaattaccaaagcgctttgtagatactgtaagaaatgtacgatacgaatatttgtttttctatttagttcgacttgtactctacaaggcaatgccttccttgcgttgccctcatatcatagtaagtcggccgagttgatctacggccgggtggctgcgatgtacatggcccacgatcgggagagcccgtcgtccatggtcacgttgcgcagcttctcgagcgcgaactccttgttgacggtggcgtagttcatgtagagcagcgagagccacgggttggtctgctcgtcgttctggacgatggactcgcgcgacaggatctggtcccattcctgcgagacgaagtcgcgcgtgcgcacgaactcggtcacggccgtggccggcagcatctggatgccgtggatcgcgtacttctcgccgctgaaccacgtggcgtagttgaccttgttgtcgaagaggatgcccatgaccttgttgtcgcggtagcggtccgggtgcgcgcggttgccgtcctcgagcaggaaatacgtttgaatagcgcgggcgttgagcttgaccatgagcttgccaaccgtctcaaggtgggtgtcacccgtgaccttgcccaacagcgtcatgccgtagtagaagttcatgtcctcggacgtgctctcctcgtccttgccgtctcccagcgccgtgatgccgtgcgagtacgagtggccgcggtaccagtcgagactgcggaacttggggaagtacgggtcggcgtccgacgggttggcgacgtcgcggatcaagaagccggccatgcggttgagcgcggggatgcccgaccaagtggggtccagcttgttgatgatagcggcggtgacgacccagtagccgtagtggtagtggtggtcgttgtacatggtgttgccgaagtccacgttcgggtcgtggagggtgaagccctgcgagcttaccacgccgcggtagatggtgtcgtagttgagcgggttggtccacgtgttgttgaggaacggcgccaacatgccctccagcttcttgatacagcgcgggagtagcgtcgtgtcgtctgcgcccacaacggatgcatctccagccatcagacagagagaagcgtacttctgcgcggccttgccgttgaagtagtagctctggcccagcgcgatggaccactcggagtcgatatcggcgataaggttcttcttcatctcgtagtttgcgacgacgctagcgtcgggcttccgaggcgggtagaagtcaatcgggaaatccacggtctccaccatgcgccactcgggcggcgacgtcttggtcaccacgccctgcatgagtccgcgcgtcgtggagtgagcagcgactccctcagcctccacagcgtatctgcggtccagagtgtcgatgtggtgcacctgcgcgtagtgcagcattccgctggtggcacagtcgccgctggtctgccacttgtacgcgtacgcgttctcgttgtgggcctccactcggccaccgttgagcacgcagctcgccgtgtcgtcaaagaccttttgctcctgcgcagaggcgtccgggatcagcgccacgcgggacacgcccgtgaacggctgcttcatgtcgagcgtcgagtggccatcgaagtatagcgagacttgcgtggagaagtagagcgtccaggtggcgccgttgtcgaactgcagcacgtagcgggtgttggtaagtgggcggttgattgactcggtggcgtcgaggccgttgatggtcgagatgttgtacaccgtctggaagcgcggcgtgagccccgagtagtgcacggtgacgaaggccatgccgctcgcgagcgtcgcctcgaacttcttggagttgtcgcggcggtccatgaaacgcagctgcacgctgaggtcgtcccagtcgaagacctcgaagaccgggtgcgacgcgttggagaactcggtggcggagaaggtgaactcgggcacttggccgtggaggtagtacatctcggcatcgccgttgccggtcaggccgccgccgaactcgcgggtcgtgaacgggtagttcatcgtgaggccgaagggctccatgtagatggagggcgtgacgctgtacgggttggtccaaacggggtacacaacgtcttcctcggcggtggcgccgatcatgttgccccaccagtcgttggtcgggatggggcgcgagcccacgaggcccggggccaggtacttgggcggtagcagcgtcttgtgggcgtccgtgtggttgaagaggctttcaggcgggacctcggcgttgaagatgggcgtgaacaggtcgaacttggcatcgggcgccacggtcgtcacgctgcgcagcgtcgacggactgggcttgaacacgccgaagaccgcggcgccgaacagcagcgtcgaggtgactgcgagcacgccccagcgactgacgcggtggctggtcggcggctgctgcgtgagcggcacggcggcgtgcgtctcgagcagcggatgcacctcgccgctatggttgggcctaggactgggggacaacatggttgagcgagcgactgcaagtgtcggtggcgaggctgtcgttgttggtgttgctgttgaagtggtaggcaaattgaagagtgagcttagaagcggcggacgggtttcggggcctgctgaagttcagtgtccgtccgaccgacagccccatggggcgcgccggccggccgatcgcagagcagggcgttgcggtcacagcagccacaaaggcgcatatttacgccggtgcgaagccatgagctggagccgcgcctgcgcccgatgagacgaaagcgtgctctcgctgtggacgagcctggccgttttgccgtaacaaccgttaaatcgatacgcccgcacacgattggctgaaaagttgaagcaggaatacacccactataactaatataatgtgatcaatgatattcgtatcttcatacgtgtactagtacaagaataagaggattctaatatttaattacccttgcaatctaccgctactcccgcaagcggctcgattaactggatcgtcagtcgaaaactgcactttcaatactgaagatttgcactgtcgacaccacttcaacgtcggcagaaaacggctcagctcgggccaagtgcaaggtgggcacgccacagtctgggcgctctgcatgcaaaatctcctctcatcgagcgcgaaacgtgaggcggagggatgcctcttggccagcagcgcgctggccggcccagtcagatcttgccgccgggaggtttcgtcgccgaccgtcatcgctcagcccgctgggtgtcgcacccgaaacgcaaatggtggctggggagtgtcaaccactaagacgattaaaacaaatactgtcgcgaccggctcagctcagtcgaatctggtggtgtcactgactgagtctttcgcaactgtgaaagcccatggtacgaactgcagggcgaacgccaaggctgtcggtttggtgtgggttcacttgaagctgcaaaggatcagcgtgaaatccagctcgatgtgtccgtagcgcgttgtggggatcgtgttcagcgcattgaagttgcgggcacaacgcggacgaccaagcaacaattgacaccaaaagctcgcaaagacgagccccgaactctcgctggaagtccgcgtcgatcgtgtcgatcatcggtagagcacaccaaatgccaagcgctccgagcaatcgtcaccccgaaccgaggccgccgatgtgacatgagatgggagtacactcgtggggtggactgcatgtcgctcataagaatgtccccctgcggccaacttgctggcagctctgggcggggtgcttatctgtttcaaagatggctacatgtacatcttggctcgacgtcaacgaaatagtttcatgtattcgtacaagcaagcggctgcgccgtttgaggcaacgccagccttattcattcttgtgcagttgctacaactggtgacctaccaccaaccccctcaagtgtcacggtgcgtccgacgctaccgacccattgcttcgctctgcgaacagcggcgacagcgactcctccgcgactgaaacctgaagtttcagcgccgagaagccactgaagcagtcgcgcagagtcgactccacgacttcctctaccgtgtcgggggctcgaaggatccgctcggaccccacacgcttcgggtcctcgacactttggttgcccttgcctttcttcttcttctggcccttgttgttacctccgctgagcatgtcggtcacggcgcccgtgatacccctcgacttcaagttgttctcgtcgtaagcgcgaccggcggctgccaagtcgttcatgacgtcggacgtcgcgttcatggcgctgcgagccactgtgatctccgccgtcgtgtccttcgctgcgcggatgtcgcccctcaggaaggccttgctcgtgctgatgaagcgcaggccgtggcgactgtcgtagtcggcgatgttgcccttgagcatcttgaggcagttcaccgcgtcgtccgccgtctggaccagcagcatctccagcttggagaactcttgctcggtggcgatgcggtcggtggacatgcccatgctaaaaacactgtcgaattcgaaatgggttgactcgaggaaggcctactgatgtcggcaccgcagccagcgttgcacgaaattgaaaaaaaaaatcgatagtggctgactagctgcgcgacaaatgagagacaaagcggccccgcccattgttcgcaatggcgaactaacggtattcgcatccgacttgtattaatcttcgctctggaagacggtcgatggctagcgaaagctcgtctcataccgaagtaggctgccgctgttgaggttccttctcgaccccgggtcccagtcatctcttcttcaaccgcgctcgagctcgcaatctgctttgcccatttcaaaactcgacctcaagcgcacaagccaaccaacaccgacaacaacaccccccaactcgatcatgggcaagtccaccgagcacaacgttacccaggaggagttctacaagctggagcaggtgttgaaccagaccgtggacgacgcgtccaactgcctcaagctgctcaaaaagcacctctccgactacgacagccgcaatggcaaccactttgtcaacacggcctcgcacttcatgcgcggcgacatccgcaccgccaaggacacggccatggacctcaagcacgtggcgcacaagatcaataaaagccacaagccgtccaaggcggaggtgtcttcggcgcgcaacatgatggacgccacgtccaaggccatggacacgctgaagatcacggcgcgcaactacgacaaggagaacggccagtcgatgggggtcaagggcagaatcgacgccgcagtcggtggccaccacgaccacgataaggagaagcatgagcagcagcacgggctcctcggcaagagtgacaaggatgagaaggacaagcacgaaggcttctttgggaaggacgacaacggcaaggagggtgaaggtgggctcttcggcaagagcgacaacgacaaggagcgtgaaggaggaggtctcttcgggaggagtgagaaggacaaggagcatgagggaggcctcttcggcaagagcgataaggagaaggagcatgagggcggaggtctcttcggcaagagtgacaaggagaaggagcaccgtggaggcatgctcgacaaccccgacaacaacggtggaggtatcatgggcagctccgacaccgtcgagacgttggtgaagaagactctgcgcgacaacttcagtctcaacgcgctggaccagcaaatcaaggctgcggagaagtccctgtcgccctccatcgcggagcgtgcgaagccctccatcgtggaccgcgcgaaggaagccatgcacgacgtcaaggacaagctcaagggagacaagtccagctcggcccaccatgagagccacccccacgaaggcctccacgacgaaggccaccacgcccagcacacggcgatgccgtaagagagctcttccccgagctgaaagacgatcggcatctaagcttccactttgcactttgcacgtagctgatcaggagggaacgttcacaatcatttaacattgacaccaaacacggcaagcagcttttttatcaaccttcgggccatggtgatatccgtgaaactttcctcattgcctgctcagctgtccgagatcttggtggcgatcgttgtgtgggtccacggctggtcgaacacgctaacggaaaacctgcgtggggacttgcacgcactgctgcagtctcctccgcgcagaccacgacagccgtcgatctggaattcgtagttggtccctgcgaccacttgacttctcgccgacaggatcgagttcacgcagacgctcgtcttggacaaggcccgcaccagggcagcgcgagtgtctggtgtgacgggggcggcggaccaacctcccagtatcaacgcgtccgcggtggcggctccagtcagggccagcagcagcaaataccctaagctgagcctcagcatccacattttcttcagaagaagactgttccgaagtgaacacgtccgatgggtcttgatcctcattagtttctatcagtctatttattgtacttttcgcaaactttattcacatctcgccgaatatgtcacgagagatcggcttcatcgggggcggacgaccaccttgacgctggtgcaacgggacactcgatacattgggcaccagcgattcgatgtcaccgttgctgctagcagcagagcgctggagaactgagactttcacgttgccagctgaccgacgccccgccatcgtgccttgctctggatcaggttcaattggcgccgcgacactcaccacgaactgccgaagcgtttcaatagcgtcgtgcggcagcttgtacccccactgctgctcctggatgacgtcggagagcacgtggaatagcgcgctcccgccgctgagcgtcgactgggaccccaccagcagcagcttctgcttcgcgcgcgtaagtgccacgttgatgcggcgccagtccgtcagcagctcccccacgtgcttctcctcgttgcagcgaacgaacgagaccaaaatcacgcccttgtccttgccctggtacttgtcgatggtgcttacttcgaccgaatggacccattccgacccgccggctcggcggaatgctgcgacagcagtgaggtgctgctggatcagcgcgacctgagaacgaaagggagaaatcacggcgatctcctcggccggtatcgatcccagcaccaggagctccaccagtccagcaaccaccttagcctccacgacgttctccattagccgacggccgttgttgcccatctgcgccgtgctcgagctctccgccgtaggcccacccatcgtatctgtgtccaagaacatgacgccgtggttgttggtcagcacttgaatgggccacaacaacttctgtccgagagtgttctgccgctgccatttcaacttgaggtggttcgatgcgactttataagagccacacttcagcttgtcgccgtacaccagtcgattcgccagcagcatgatgtctcggttcattcggtactggtaggatagctgctgagtcgcttccgggtgcgcctcagccagccggcggaacaagctgacgtccatgccttctttacgggcctgcgcgttcgccactagcggtgggagctggtaatggtctcccacgagtacaaacgtatctgcgcaacgcagagcgctcaggacgataggctgcgtgatctgggtcgcttcgtcgacgatgcaaaaatcaaatctccgcatggcgaacaggacgtggctgttgacactcagacaagtgcagcccaccaactgcgcgttaaacagcttcgcttccatcgcctgcacgcttgaaataccctcgcgctcggctagccggtccagtgtgaagtcagcaattgacgggtgcacttgcgcggtgttgccgatgcgaagcatgggaacttgacacgccagcagcttcagcaataggttgtccacggccgaatgcgtataacttgtcaccagcacagagaatccgagaaacagcagcacccgtacagtgaaggcgattgtcgccgtcttaccggttcccggcattcctaaaaccagcgcgtagtcgagagagctcagcacgcgctggacagcccgttgctgatcgatgttcaattcaaagaacgcgtccagcagagcccgaccatgagctgccacgctgccatcgtagtcgtctttggcgcgttctcggcaccgttgtgtcactaggtcggtcacccggcaaggcttgaagtgcgggcgagcaagatgtacaattaggttgcgcctccttgtgtcaccgacgcctggtgcttcctcgttcccgtcaccacccgaagtgacgattgaggccattcgaacctgcaactctggtctgctcgtcaaggccgtgccagctgaaacaacctcgggaggggttccaataaataatcgcacgagattttccttcgcgcgtcgtaagccgctcatgatggcatccttgtctaatctccacgtatactccttaccgacggtagactgcccgcttatcacgatcgacggaatagattgacgagcctcgatcgtgatgagcccgtgctcaattttgcggacagttgcccgagaaacgtgaaccagcaaactcttcccatccaacgactccgctgacaaaatgacacgctcgtctactcgaaagcgtacgcctgcaaacgaagttggttgcacatagcctccacccccgctttccatggggatatcctgtcgtttccgtcgatcacgaacgaaccttagagttcgctttgccccagagtctgatggtgcgggtgtatcggacaccagcttgaggcttgctatgcaggtgctgctctcctgcgcttgctctcgcttccatccaacctggagccacagtgcacgaagatttctctcggcgtgctgctgctccaggtcgatgagccgattccattgtctaaaataagttaaatctgcttcgccaaggtgccttgtcttttgcgtgaatagctcatccagcccgctagattcctccgtgccgttctccgttgccgcatggtgcaagacgcactcgtgtagctgaaagcagcgctggcaatctgtgcgatttcgaatcatcggcgggaacacctgcgcggatgtggagcttccaatcgctttcactttggcgatggcgctggcgaaattgttgcgggccatgatgagcccacggatatgcgtagccattgcggcaatgcggttggtttcgatgggcgggacgtagataagcaagccatcctgacagcgttgccgatagcgttcattcagcagcagcgtgtacaggatcacttggccctggtgctcgaccccagcatactttttgctccctgtcttcagctcaaggggcagaactccacttccagcttgcgcaccatttgaaatcccgggatcattgatagtcccttcaactgaggcatcggtggcacctttcagcccccatttaatggaccacatcatctcctcggtcgccaaaactcggctaacgcgcaccctcgatccattcttgggaggtacctcgtttagcgtcgtaccagatccagcgatggccccacctacccatgaccgatagtcttcgataactttttgtagttccaataacgccttttcttcgtttaatccgcactcgacaagccctaaaatgctgcacgaatggaaacaagagttcgttagacaactggtataaagaacccaaaaaattgtcttgaacttccaacatactttgaatgcacgattcgcttggcctcttggaaaagaccctcagtattgtacacaccattgcgaaccgcatattcgaaaagatcgtgctttaatgtaccaaggaaagccttttccccggtcgtaccactgactgctagcgtttcctgaagtacagcgcggcgtaagcagccaaaacttgtcgtaactcttgtgggtgatacctggggtaatagagaacagaggtaaatgcacaatcagcactattaccatatcaccctcaccgcaatgatcgatcatcgtaccagaatatcagggtggacgaccacgacgttgtgcatgttgtcgacctgaatgcgagttgagtgccgccctgccggcacattgctgcattcttgcgagaagaatccattcctatcctgctcagtaaacacaatattgatcgtatcgccagcctcgacaagcacgtcataccagtcttcggtcagcaaagcctccagctgcacgtcttgatcatctaagaggcgcaaaagcagcgagcggttaacgacgtcgcggtccacttccaaaactaaaaatcgcctgaagctctcgggccgatcaggctgttgggctgcgccgacgtcatgcattgatcgcaccactggagccggaacattggctggtggcatcggcggaggcttcttcggtccgtcaaacgcagccgacggcatcggccgcggcgtcagcgcgaagctctgagacgacacgagctccgtctgcgactgtgactgcgtttgggtagcgtcaaccattgctcgttggctcaccaactgatccatcaggtcccaggattcgtccggcaggtcgccaaacggatcctcctcctccacaactaccggctttggcggcgttttcactgcctcctgctctttgactggtgcgatagccctggccggttcctggttcctgttcagctcctgagtcttcaacatttcctgtgtccgtagcgaccgaggagacagcgtgccggtggacgaataggtgggagctggggtcggcgtcaggttcatctccgttgctgctgctactgccgtagtagtgctggtcactgcaggctgctgatacagctgccgcctcctgggcgacgccggccttgacgccgtcagcggcagcgccacgtcggggctggcatatttctgctcaatcttgtccagcacactgaagagctcgtcctgcgagtcccctctctcggtggatcgccgtctcgacgccgtattgggcgtcctctgtgcggcatcagctccctctgctctctcggggctgaacatcaagagcctcgaggcggctgcatagacctttaattagtcataatacaataatacacccccgatcaagtataataattatttgaggcccccacctttctcctcctcagccgccgccttccgccgcgcgcgcacgcgctctcgggccggcggcttcttctgctcttcctggctggagggcggcgactgctggctggcgcgcgccaggcgccccacgaagccctgcatctcgcgccgcaccgccatcttgcccgtgcccgagaccttgatctgcttgtcggcgggcgagtccttccacacgatcttggactcggcgccgcccgagccggtcgtgcggttggccgaggacgaagaggaggcgcccttcttgccgccacgtcgaggcgtggacgactcggcgcggcggcgcttgcgcttgggcgagcgagaccggtccattattggcggaggcgctggaagtgcgcgctatttgttgcacttgtgaaagcgcgccagtagaatattcgattggagagggttttagtcggttaagttcggatcgaattacggctaagttcgtgtcacttcaacttggcggatgaatcttcgtcaagcggttgacaccgaagaggcaaggacgtatcagggcgtctatcgggcgagcttagtttacttgtattgaggcgagtgtaaggattacctggactacgtagctatacatgtgattggcagcgtttagttgagcccgatgctgaacatggcgagctggtcctcttcgacttcctgctgctcctcactgaggcccgcccaacccatcgagaggcagtagaatcgacgccgtagtgagcccagcacctgccggcggaaccggcagaaccacatgaatttgagcagcacaggtctgatcactgcagcttgccgacgggtagtgcgggcaacaaatgcaacgcggcactcgtcaagcagttttcggtggaagcgtcgtcgtcgccaagtcagcgctcggagcgattccctgaatgcggggtgcaaccggatcacaaacttgtggcgcagcgtcagctcggcgttcgtgatcagctgacggaatcgcctcctccagacgaaccgacgcaaagtctcgcggaagaccgggcgggagttgttgacactgtgcagcagcgcggactgcctcagctcccagaagtcctcgcctgcagcgctccggaacgcgttgagccacgactcccagcagtcgaacatcgtcatgtcaaaggggtccactgggagcagcctccgccggtggagcctcttgatgcgcagctcgtccgtccagctcatgccgagtccgcacacacaccagacgctgctgcagccgtcgaccttgacgagcatcacgcggcaggagcggcactcgacgatgtcttcgtcgccgatctcttcctggtcctccgtctcgcacgggcacggcgcactcccgtcgcccagataccgtttgcagttgaagcaggcggagaagccgcagcagcgagtcacgacgcggcggtggacgctgtgatacgcaagcagcagcgtcgcgcgacgctcttcgtcctggatgagcgggagcaccttgtggacgatgcaatgggtcttggaggccgggaagttgtcggtgatgtggcggatcacatcgcgtgcagtggccgtctgacggtgtcgacagaattggcggacgacgcgccgaagctcagggatacgagccgcttcactcggtcgaagtgtaagagctacagcgttggcgaagtccagacggccgtccgtgtctgtgtgggagcccggtagctgcgtgtagtgcgggttatggcaacccggacacgtgaagctgcaggcagcgtcgcatcgctgcttgtactgccggagcaggggcatcgttgtcacggcgtcggggctcagccagcgagcccactgctgtctgttcacggggacgagacacacagggcagcggaccttgggcaacgccccagcgtacgggacgtgcatggccatttgcaggtgcttttcgaggcacggcgtgcagaagacggcggggcagaccgacgagcagaagcgcgtgacgggcttgagggttgtctggtccttcaacgtgagctcctccaggcagatctggcaggtcacagagctggaggcggtgcagattgcctcgcgagtgtccgactgcgcattaggaggcatggtagttggatgcggaccgcgaaatgtgaagtgaagagttctactgcaggcaggacgcaaaaagtgtagccatctgacagttcagctgaccttcactcgtgattgtcttcggagtgctggtcgttgaagtgccataaaatggctacacatattgcatgcttccagcagtatagtacttcctcgcttttagcttcaagtagattgcacgttgccaggatcccgatcgagaatggttgatacatgcaccccctttagtatatttctcgaaaaaggcaaccagcatcacgcagccccaacgctgcgctacagtagcagttgcagttagaaatcatactcgtctcctctcggactggcgatcgacagctcttcctttgcggcagccccctcgggatttcccttcaagtccgcatcagggttggcagacttcttcgagccgtgcttccactcgcggatctcttcgcgaagtgtttcgtcgctcacaagctgcaggagcgttagaggctcccctgttagtgggcaacgattgccaaagtcgcggaaccacgcctcgatgacctggcgctcgaacacttgtccgtacggtgaccgcatcgggtctttcatcagtttcagcgacactgcgcatttgaactcgggcggggtatctcgtgatcccgacttctttttcttcttcctggaggggtctcgctgtttcttcttgtgtttctccttgggtggtgagtcagcagcaggtgtcttggcgtcggtgtcctcttcagcttcgtcgtcgccatcgtcaaccgcatcggcatcttgaatggtgatagcgttcaggcttggcaagtctcccaataactcatactcttccttgcgcgacaaaggcgtagccttcttcgctggggtcggcttgtcctcaggtttcggagatgagggcgaggctgcagcttcgctcggttttggcggagatggagacggcgcagtcggtaggtgtgacgcgatatcttccagcatggtgcgaatctcgctatggatagtgaggtctctcgcaatagaaccacggtcagtcttgagcagcacgtcagcgccgtacacgaccagcatcttcactatcggcacacgagaatgatatgccgcctcgtgtaacgccgtccagccgagtttgttcgtcgcgttcttgttgactccccactctagcagcattttaacagtagggccatggccttgacgagcagcttctgcgagtggaaattgcccggggaacgggcacaacgcaaactcggggcatatcacatcgtgcttggcaccggcacgcagcagctcctgtgcaattgtagtgtacccccgatggcaagcgtcataaagcggagtccatcctactgagttcatcgtatttacattggcgccagcacgaatgagcttgatggccagcgcctccagtccgtaggcacaagcgatgtgcagtgccgtccagccgcacgagaacgaaccgggtccacgacgcgtcaccaggtttaagtcggccttgcgcgcgacgagctccttgaggatggcgatgcctgcctcctgcgcgttgagcatgtggcaagcagagtgcaggggcgtccagccatcgttgttaggcaaatgcagagtggccttgtccagcacaatcttgtcattgccgatgtagacaaccaacttgctttcttcttgagcctcgtctactatcggtggtttgtcgcccttgtcggcggcaggcttgaccacttctccgttctcgagcatcaattgctggaacttgccctcttggtcaggcgaatgcacgagcagcaccatgttgccgcccttgaagccgcgcgcttggtctcgagggttcttgggtccgatgtggaagtcgtacagtcgatacaagtccgggaagcgcacgaagcgcggatccagcccctgcaccatggcatccccgaggatcatggtgcacgccagcatctgctcgaaggacgcttgcgttgatgccgcgccccccatagctccgtcacctctggttcacaataagtcgctacaggccaaacaactacagcgcagaaaggttagtgggaagcttcgcacgaaggcgaccgttcggcgtgaagatgtggagtacacaagcacaatggtcaagcgaagtcggttgcaatttggtcaacggatcctgctttggatggcaaccgtctggggctgcgggtgcttcattcagttgctggagatcactatggcgctggggccgcgatgacagacgtgagctcggtggtgttggtccatggctggtcgaaaactttcaccaggaagcggctgacttggttgtgcgaggcgctcgagccctccacctcgaactcgtagttggtgcccgccacgacctgcgaacgcacggacaaaatggtggtcacggtcaggtcagagccgaccagcgcacgctccaaggcggcgcacgcctcaggcgtcacaacgccggtggaccagccgccgacgatcacgatggtctccgacatcttctgcagtgggggaagcttcagctcgttggatcccgtttcagttttatgttccgctggatgcaagcaaggttgttaaccgaaatcaccagcaagagagcagcagggatcaacacattatacagctcacgaatcaacatgtaaaccccattccggtgcggctggcactaacgctcgccgtctgctgctctgctgatctaccgttttcaacactggaggccggatccccgactgaccctgcacacttgggcccaccatccccgccttagtttgtcatacctcagttgcctattcgtccttcttgaacattttcttgaacatgcctccgatgcgcgacttgcggtggccatcgtctgagtacacactgctccggttgagactgccacgatcaggagggctaattccctcgccctgaggcgacactccttgcggcaccgggttgttcataatcgtatctagagtcgcacgacgttcgttgcgcgtggggttcgagccgacggccaccgacactggcacagttcccagcgaagtcgctgtgtccgagcgtttatcgcgatactcgctttcccttcccgtccttgagctggcagtcctgcatatcaacacaaagttaccaatttgacatcaagtcttgacacgacaatatgccatcagggaacttacgaggagcgacgacccgtaggtggacgagtgtactcgctgctacgccttccgttctcatacgacggcttcgagtcaaccgccattgcccgcatgcgttccagcaagtcttcggaaacgccgtcggactccgctaggttgatgatgtccaccagaacttcctgctgctgcacacgggccttaagctccgccgagtacacggagcgctgcatgcgcaggtcctccttcaattctgccacctgcttcttgtacttcttcatcttctcctcctgggacttgatcaaagcagcgtgggtgctcatgagccgaaggttggccttcgactgctgcttgttgtgctgatttagcgcagcgaaagacgcgccggctgccgtgtacgcatccttaatcttcttgttttccgccttcagattttcattctcctgggacaacagttgaatgagctcacggcccttggtgacctccttgcgcaagtaatcgatcatgcgctccgagtcatcaagcagcttgccgtcatccatagactcgcgctctatcctgcttaaccgcatgctgctgtttcggaaattaggcggtccttcgctctcataaatgctgctgtccgcgctaggtacagaggaactccgaacctggttcagctcttgctgaagcgatgagttctccgcctcaatttccatgcgcgcacgcttttcatcttccaggcggtgcttgagcagctcaacttcagtttccatggcatcctgctcttttcgttcggacaaaagtttgtggtacttgcccacctgcttcttcatcttcagcgtactctggatcttgatgacagcattgcggaacgttgcgtacttcttttcggagaggtacttacggtaagcagtctgcaccttaatcgcgctcttctccttcatcagcaaatacacgcgctgacgtgaacggactccacgccacacgctctgcacaacaatgcacttcctgcgcttctccaggaacgagcgtcgttgcatccgacaacggtgaagagcctgaatatttgagatcatagtccggaccttcttgatccttcgccgagccatccaccggcgagcagtctgctgaatcacaatcgctcgctcatgcacaaacgtagtgcgcctgtgctccaggaactcgagaacgtccttaccgaagtagaccaggctcttaccaaccacgaaagttggcgttctggaatgctcgctaccctcttgcgttttcgcaaagtcgtctccactcagcagttccttggctagctgttcgcatgcctcagtcacagtcgtagatgctggtgcagcactcgcattctttttgcttcgcatcatcacgaatcggcgcaagaacttctcgtgcgccatcttgttcgggaacgccgctcgtgtaatacgaatagcttcaacaacaccagcacaccgaagctggctcacaactgcgtcgatttcatagctgttggggctcttctccgagttgggcttgatgcagcgtacgtagtgaacttcagtgctggagatgtcgctcatcagcagtgacaactgcgccttgaacttgtagctcaccgtttcctgcatgaacgtggacgtcttccgactgacagtgctacgccgaccaccctccatcatggtagcggcacggacagccaggtctgcgtccgtcatgaaagcagtgttgtcgtcatcgctgaataccatcgacatcaagccgttcgagctcgtgccaagcagctccagcagatcagtctggagtgagtccttgttcttctcaacgaagccctctgcgtcgtacgttacaggtcccgcgtagtggtgcagcatgaagtgcatctgactcaagcgggctcgctcaagacgaggatgtgactctcgtagtgataccagcttcgatacgaacgatagatcgctgcccatggggcggacacactcttcattcagcagtgccatcacgcccatcgagttctccagcaggtcaagcatatcttggttatcgcggtacttgacaaactcccacgcgacaccctcctgctggtactcttcctgaaccgtcttgaacacatccaatgtgaacttctgctgcagcttttcgttggcaaagttaatgcagaactgctcgaagctgttgtgcttgaaggactcgaagccgaagatatccagcaggtcaatgtgcagatacgacggcgtcgacgcacctctgtcggccgagttcgaaatactgtggttcacacggcgcaccaagtagccgaacacgcgcgcatagatttccttggccagagcatcacggttgttgccagcatgcagagccgacagcggcacgcagtacacctcctgtcgcgccttgaccgtgcgactgcagagctgcttgctcagtgcagcaacctccacgcccaggagcttggcgcactgctcgatttcgatcttctgctggtcgatctgctcggctgagactgagtcggacgccgaagcggcagcaacggcctggctggcgtcgtccttgttggactcgagcgggacaaagtcgagctgacccaaacgcaagatgccgcacagagcgctgaagagctcgttctgctccttgtcgctgagcccgatagtggtcagcgcgtcgcgggtcacctggtagcgctccaggtccgtctgaccgtccagaataagcttctcgtcctgcaggtatcggaactccttggccgacgagtcttccgtgaagccgaagacgtcctccttggcgctcacgagctggtagaagatgtggtagttgcgctcgcccgccgcctgggccacgacgcgggacttctcgagcaagtagtgcctgcactcggcgcccacgaggcagtagtcgctgttgaactgcagctgcgtgaacttgccgaagcgactcgagttgtcgttgcggatggtcttggcgttgccgaaggcttcgagcagcgggttgctcttgagcaccttctccaccacgatggtctcgccgctctcggcggggtgcagccgcttggcgatgcccatggagatgctggccaggtgctccatcatgatcttgacggtctcggtcttgccggcgccgctctcgccgctcacgaggatgctctgcgggatgcggtgctgcttcatgtggtggaaggcctcggcgctcgtggcgtacacgtgcggcggcatctcgtcccacggccgctgcgtgtacaggtcgcgcagctcctccgagtagttctccttgatccactggtacgggttcacggccacgacgatcttgcccgtgtacgtgtacggctccttggcgaagaagcgctcgcgcacgttgtacacgatggcgggctcgtgcaggtggcccagctcgcacatgtcctcggcgccgacgcccgcgtgcttggcctttgcgtcctcctcgtcgccctcgtgcgggccgttctgcagcggcagcgagtcgggcatgccgtcgtcgttcaggtcgatggtgcgctcctcggcgggcgcgtcggcctcatagtccgaggaggagggggaggaggccagcggctgcacacgcacgcagaagaccttgccgctcgcgtccacggagaggacggtggccggcacccacacgagcttctcgtccgggatgaacacgcggatgccctccatgagtgcgcacacaggagtgatggtcaggcaaggagctctcccctctcgactagctttgagcccgaagcctttttggcttgggctcgagggagctgttgcgtgacgtcgagcaacacgatcgctttaaggagggttgtggccattttatgtgctaatcacctagcttttgtatggtgtctttgggcaggcaactcacccgcgcataagtgaatctgctcgatttggcgtgagataggctgcctaggatggaggcgctcaggcaagggggcgatctcctggtggccaatggcggcggcggcaagcgctgcagcgtgtgtctgtacgacgcgtagaagctcgagctcgttgtgggctttgccaaagcccaacgtaacgacgacgacatgggtaccgtctccaccgaattttagtgacccactcgacacagtgacatggctacacttttccgattaccactgctatttttacgggcgagagcatgaggcccatggccatgcatgcatcgagcgtgctctttgcccccagcaaggctaaggctgctggtctcgtgcatttgtgcatatcgtcgtagacgcactgtgcgaaatgcccgccgtgcgcttccaggagcgcgacgaccgcttcgagtacgacgcgttcacgactgcggagctgctcggctcgcaggaaggggacgacgagaccctcaccggccggagtgcaggcaccgaaggcagcgagcaaccttcggtgagtgaagaagacgacgagcaatcgctgctgagccagctgtcgacgctgcagtccgtcgaccggcctcggtcggtgcggttcgacgacgagcagtccgatgtttcagaggagccacagtgctcgcgcgccgtcgcggctggagtcacgtcctcgtcgtcgcctccgcggtctccgctgctcaagaagttcgctccggtccaggatcgacgcgttaacacaatcatccaagaggcattgcacctcaccgacatttcccgagacgagatcggcctgatcgagcgatcggtcaagcggctcaatgacgcgatcctgggctttgtgttgctggtagacaagcaggtgaagatcgtgggcactccgactcccgaggagcgcggccgtatcaaagccgatatcgcggatctgtcctgccagttgaaggcctcgaacggtttgatagagagcacctgcgcgcgaatgaagaagcacttggtagcggggaggaaccagctcagcgcgcacaaacgcagactcttcacggagcaagccgatgtagacaattcagccagcgaagtgtcggagtgcacgtcgccacgctgtagcgtcaatgatcaacagcaacaacagcactatttgtaccagccacagcatcaactgccgcagtgtcgacctcagacggctgggcagactggaattcgcttcaaccgatcgcctccacggcctacagttgcaccaaacatcccgtacggctgcaggggcctggcaacgaggagcgggctgtcgcctatgaagggcggcgcttctcctggcaggagaagtagctccgggtcaggccctcgaacgccgcgagcgtcgaaagtgccgctgatgtggatcctcaagccccgtccggctcacgacaatgacgaagatgacgaagatgagcgctctcccacgggcatcgtctcacctgacctgctctcgtcggtgctcgacgcagtggggcttcaagacaaggagttcctggaaatgagggacctgcggacgttcctgcacggcgtgctcgccttcttcatcgcgcggaacccggcgctgcggttcctggacaaggcctaccaccggcgcctcatgcccgagtacgtcaacgagctggccgacgcgctggtgatggacatgcagcttatcccgcaggtgagctgctcagtcgctttacctcccatccttgggatagattcgtcactaacttcaccttgtgcgatgcaatgcaatacgtagctctcgggcaggtcagtcatcgtaactccgaccagcacgctggaggagtatgtgtgtacggagcccttccgcttcgaccgcctgctgcaccgcgtccacgtgaacccgagcgacagctccgtcaaggacccgtcacccaacggcttcttcacgccgccgccgttcgcagacgccgcggcggaggcggcggccaagacgttccccacgagcccgttcaaggagcagatgactcgcaacggaggcatcatgaatgggggcaaggtcgtggagctcgtcgtgaccaagccgcgcgagcccgagctgatcgagaccgcggagcagacgctcggcatggccaagctgctgcacgagctggccacggccgagtgtgaggcgcgcaacggcaaccgcatgtcgatccgcgcgcccgtgccgcacaccaaggagttctcgcgcgcctacatcgcctcgtccaaggagctgatgctgcaggagacgagcttcctatgaagaggatggatcgatcggtcggttcaaataaaataacgggttgagttcgtgttcatgcagtagacggaagccaacatgctgcacgccatactgctcgctagtcgccgtggcgctcgactactcgtttacacacgcacgaccacttaaccactacctattgtcacacccttgctcggccgctggcgtccccactgttgctgttgtctccgtccctcactgcttccctgactgcttcacgttcaatactacacggtgcttgaagaaaaaaaaatcgatccactgctcgacgcgctcaatactccaccatccgcgtcgagtggttgcttgcgctgctgttgcgccggtactgttgtgcccgccgcttgcgctcgcgctgctcctcctcggggttgagcgtcggcacgctgtactcgcagagcgagacgtaagatgagccgcgctcccgaatagcacagggtgcgacactcaggaacttctgcatggcgaacgactctctgaggaaggccatttgctgcacggcacgcagcagctcctggaagctgtcgcacctcgactgcaggtgcgatcggtcgtgtcgtttccagaacgtcaggaagcccgcgtggggtagcgagggcagcgcgaacgccatgatggcgcgctcgagcttgtcctcctgggtcatggcgtcggcgggcacgggggccacgcccctggccagtctggacagcgccttgctgcggtagtaggcctgccggttctcgaggatctcggtgagctggctgtgcaggtccttgaagtccgagtagctgcgccggatggtgtacgtctgcaggggcgcgtcgtggtccaccacgtcgatgtggtacatgaccttcttctcgcgcccgcgcatggagaagcccgagagcacgaggtccgtgcagccgcccgacgacgacgccgtggaccggcgactggacgcggtcgactggccgagctcctgctctctgatctgttggtgctggtgctgctgctggtgctgctggtgctgctgctgttgccgggccgcctgcttctcgagctcgagctcgtcgtccgcgcaggtcatggtggcgttggacgggggctcccgcggcttgagcaggtcgtcctcgtccaggggctgcgccttgtcctcggtctcacatacgggccccagcgccgcgtagaagctcgagctcagccccagcgcgtcgctctggatgggcgactgctgcagcacctgcgccgccgccgcgaagtaccaatcgggcaggcggtccaccgccgcctccagctgctcgccgcgcgatacaataggctccgccatccaccgcgcgaattcacttgtgacttgagcagcgcagaaacggcggccatgcagctgtgcggggaacgcccgagcagcgcatccacgggaacctgtcggggctatgctcgccggcacgggcagttgtcaaagctggatcgaatctcttgagttgagaccgtggcggatctgcccgtaaacgcgaaaacttatacaatacccaggggtatcacggcgatttcgggtcaacttaggggaacctctgcaagcgataatgcacaatgtatgcgcgcttgaccggggctgctgctgtttgagcactgcagcgcgcagctgttgtgcatgatccagcgcttcggcgcaaccaggaggccaagtcttggcgagctgctgtgccttgaaaatacggtgcctcgcccatgtgtcggcgcgggagcttgaaccatttgtattaatccaggccgagcaaaccaccacgccgctgccagacgcaggcaatggcaatgctcacgacgctgtttgcaggctctgggatgtggatcagccatttgagttgctggaagtgaaatacgcaggataagacaagttgtaaatattgctcgacgttcgacgtcgcgatccttaactgcgaaaagtcagcgagagagagcgcttattcttcgagatcctcgcgatccggcccctgcgagacttataaagctgcagtacagtactctcggttggccgtgctgcattggttcatcgcagagggatacctgagcctgatcgccgccgccgagccgctttttgtgtgtgcgcaagccatgcaaaggttttacagcaaaacgcgattcaaaacgacaagtgtcttctgccagaatgatggtcggatcagttgaagtagtcgcacaccgagcctgaggccgccgagatccgatcatttaggctaaagggccccttgcaaagtttcttgcttcgccagcatgccaccaccgcggtggttctcccctgcactgcaagggagactgcacactgcgtacgaactcaaatccccggcgtggtgcagagcgtggcccagatagatggataaatatccatttgggctgtacgctcagcaccggcgaaacgctacgttctctcttggttgccggctccgactccttccggctccgcgcagcgccttgcttggtctcgcttcttccactactcaacgactcggggcgcattattcgccagacaagccaggctcgctcgatccaggaataccccgtattaatagtcatagagcgctggcttgcctctcctggaggccttcactgcagcctccatcggcgtcgcgagtgtgatccgtccagctggcgtctggattcgtctacttcgccaaccaacgccagcatgacgctacagagatctccacggtccgatgccgaccgccgtcgcgagcgggagatgcagcacgagctgctcaagttccaccgagagcaggacgacccgatcgccaccaacctcaccaagaagcgcgtgcgcgagccgcgcgtggaagtcgagaccaatccgttctgcgtggagcgccaactggccgacagctaccagcagttaaacttcaacaaggtgagtgacaagtgttcgcgctgaccccacgctgactcaccgcagacgttgcgtggccctgactgctgtttattgtgccacttcaacccagaatccgcgcttctaccaggtctcggtgcaggacggcgcgcgcgccggacagaacccgcggaaccactcgagcgtaaggattcacggtgaaacctggatcctattgaagtgtatcttacatctacgtccacgccttctgttagttcatcaaccagtcggccgacctcgcggccagttcgcgcgtggatctccgagcacggcccgagttctccacgctgccacccgccacgtcgtacacgccagcagtagcgcacttcgcgacgccaaaggttttcagtgtggactcgagcgatctacgacaagagcgcaactgtaaatgcagcggggatgccaaagctagtgcccgacggttgttcccgccaggtcacgatcagtacgggtatgtgatcctctcgaatcatactttcgacggctcaaacgttcagaactcacgctcgaaactatgattttgggtatcgttttacctcagagcacagctgacgtcccaaagcgtgacattcggccaccgtcctagcgtacgaacaacccaaacttgatcagaagatgcaaggtagcattgccacctcattgacttacgagcatcctcttgtgcttctgttcaatttcagtctgccgcaaggatgttcgatcatttgagcaacacggtcagcggcaccagcagtcctcgcaaccaacgaagtaccaagagttcgtctcgcagagccacttcgactccagtgaggacgggaatgagcgtcatggagctggcgcaactgttgactccagcaaaatccgcacagtcctcgtcactagctagcaaaagctcgagcaaaaccctgcaacgctggaaaccgggttcgacaaaaagctcgcctgacccgtgcgaagctttctctctggatgaagaagtggacgacgagctcagacgacaagatgcggacaggaagaagaaggcgcgcgagatgaaactggagaaaggcttcatcaactacgtctacaacccgccgcgagagctcaagcccggccagttcccacctccagaccaaacgactgcgcagcttattgataagtaccgtaaactcgctgtcggcaaaatgcccgacttctaatcgtacaagtacatcagtagtttcctactgtagcccttctccaggcttagtgatcctccttttctgacaacaaagtaactaaatatgcgttgtattatcttgaacactggtctagaagtccgggtcccagtcacattcaagaccaggatcctcgatttcgtggcgaaagtcctcgaagttggacgtgtcgaagtcgtcacggacctggggcacgatggggggcttgatgctcttgttccgcagactgtcccactggaagcccgagaaccagcggtggttgatgatatccttgatcccgtgcttcatgttgccaagccgccgtaccggattctgacatagcagtttctgcactaggtcgacaacagctcgtctgtacatcaagtatcgaagttagtgcaaattcgagaccacagtcaacaatcaaagctaactaaccccatgtacgttgggaacttgacgtttccttggataatgagagcgtagatctgcatcgggtcttgagcgtagaacggggctgatccagtcatgagctcatagatgaggatacccaacgcccagtagtcgacggccttgtcgtggcccttgttcaggataatctccggtgcgaggtagtcgggcgtgccacaaagcgtccaagtgcggtcggtcacgagcttggccagcccgaagtcggccagcttcatgaagccttcgttgtcgagcagaatgttctcgggcttgaggtcccggtatataatactcttggagtgcatgtgctggaaaaccagcacaacactggcgatgtagaaccgcgcgacgggctcctcgaagtggtccctccggcgcaaatacgtgaagagttcgcctcccaatgcaagctccacaaggaaatacaagtgtgtgcggtccttgaaggtcgtgtagagcttgaggatgaacgggtgatcaagcgcgagcatcacgcgcttctcgttcaatacgtgctccttaaggttattctccacaatgtgcgacttgataaggcacttcagtgcgtacgcgcggtttgaagctgcgtggcgtacaaggcggacacgtccgaacgccccacgtcccaaagtctgcagcacctccagctcttcgcgtgggatctgcatgtagtacttgtagtctgcaggatccactagcgcctccgttgaagtccgccgagtcgcgaggtccttcgcctcgagatgggctggttctcggtccatgagctcctgcagcgttccgagcatggcgataaattgagcgcgttcgagcgtgatgcactgcactctcgtcacggcggtgcacgtggccgacctcatttcatccttgaacagcgccatttctccaaagtgatcggactccttcagccttcggatgatgttttcctcgcccgtgttggcgtccacctgggtgaccacgatctcgcccttgttgatgatgtagaacttctcgcccacctcgccctgccgcacaattaccgctttctcttcgaattcctcccagtccatcgctgcagcgacttgctgtagctctgatgatgtcaatttgctcagtagcgcgatcttcccgagaacttccagcgtccggttgagtcgattgagtttgtgcgaagccaggatttctcggaaagtgtttcgctccagagcccacagctcgccgtccgtcacggcacgaatcgtggctgctcgaggcatgttgtacagcaacgccagctcgccaaagcccagtccggggcctagatatccgtaccgaataggcggagcccctcccatcgacacgagaatctcgagctggcctgactcaacggcgtagaaattgtcgccctgcgctccttgtttgatcacagtctggccaggcgtgacgtgcatggggaagaacgcgtccaagcagtcgcgaagttcgccatgcgattggcctttgaacagcacgttggactgcaggactttgagcagaagctctcgtgatcgttcactcttcgggtagaccacgcgttccttggtggccatgatcttgcggctcggcatgacctcggcactcacctcgatacgtctcagtttacccttggagccattgggaccagcactgaaggagccgtcgagtcctctagcctcagctgcggcactgtattggtttggtgcgtcgctgtcgggcaggtcgatgctgtctccgagcagctccttggcttcgtgcagcaacgtaaaccgcgagctgaagctggcacctttctgcagcgtcagctctgcgttcgacactcgggattccttcaccttgggcaaggctgcagctgtagccgctcggtcgggcggcactttgttgtcccctccagtctgggccgggccaaggtacgcggtgctttccagtcgctcttgcaaggtccggatgacctggtccttcactaccagctccttgcggatgcgctcatactccgtcttggacacgccgccgcccatcgttaagcagtcgacagcgagagaactctttcgttaggcgtggggcatccccgagggcccgctcaagtatgaagtggagataggaagtctggctgtctcacagtcagcggtgagaacttcgctcgcttgtcgtcgatgtgaatgctcttggtggtccacgcgcgaccaaggcgagagcgtctattctgttcttggtcggcagcgcggggctggctcagaccaggtcaagcgggcaaaaatagcggcctcggctgggtggtggttctcgatatacttatcacgaaaacagacgcgccgatggaaatgctttcgacccgcccgcattcgcgcacatggctcgcttcaacgtggcggtggattagaatatcgatacgtgtgccaaatccccgacgggctccgcaaagtcgaaagtgaagtaaagttgaagcaattgcgcacttccgacatggctacattctggaccggcttcccgtctgactacagaattggccgacaaatcctgaagggacgcaatggggcaagacaactgcagccggcgtgatggcagcttcgcgccgaatgctgctgtctcagccttcccatcacgttgacgagacgggggtcgcgcgctgcccggtcgccggcgcgaacgaaacctgccaaaacgccaagtggccactgaatggaacgctgtcgtgcgcgctttgcggagtcggcggcgcccaggaaggtgcaggttgccagcgaacgccgcaccacgtggtgggcatttaacgatcgctgcgcttccggcgcgctcatgaaaaattcaatggcttgttcttgcggctccaagtctccatcgccggtgttagtgctctcgggcgggatagagcgcagccgagttgccctgaaatccaacacgcgccaataacctggcggttccgtaaagaaagagagcgagtaaccgcagcgaatgcattgcgatactccggcagcccaggcaccaaacagtgtcattcgccaaccgaccgagcagccccgcggacgcgtcttcccgataccgacggcgccctgcctggagctgacagctctagggttaccaagccttcccccagttgctaacgctgcacaagcagcaggtacgtccacagcagcgctcgttgcctaactattttccggtactcacggcggatgtgcgactgggacagcaaacaaccggcccaaagacacaccaacccaaggcggagctcagccagccgacgagtgggaacccagattgctctttaccactccgccttcattccgcgatcggccgagcgtcgagcaagcaagtgaagtgagaagaagccctcatgcgggtcgtcgctcccccctctctgcgctacagcgagtcggcgctgcccgagcgcctggacccagcgttcccgctgccgccgagcaacaaccgcagcagcctggcggcgctcgacaagccgcacgcggcgggcctgggcgaccccttcgcgctgcgcgacagctacacgagcgaggccagcggcttcgacgtcttccagttctggaacgccgagacggaccacgacgcgtctgcgagccagctgctgacccccacggggctgctggacccgtaccagggcgtgaccattgaggtcaacaaccactccatcaacaaccagggcgtcgtcatgtaccacgtggacatcaagggcccggacggcatcctgtccacctacacgatccgccgccgcttccgcgccttcaagaacctgcacacggagctcagccgcctgctgctcgagtaccagaacgcgcgcgcgcagcaggaggctctggccgacggcccggagaaccacatcccgctgagcccgcacagcgccgcggcgctcgagaaggcgccgccgctgtccaacaccaactaccgcacggttgcgctgccttcgctgcccagcgcgggcgtctggagctatctcaagcgccacgacgtgcggctcgtggagcagcgcaagaagcgcttccaggagatcctgcgccttgccatccgccacccggccaccaagacgagcagcgtgctggacgagttcttgagcgtcgcgcccagcgagatctcgcagcggggctcgtcctacgtgtcgctgcaggactacagcgtgcccgtgttcgaccgccagcgcgagtccatcgagcggcggcagaggaagatgcgggtgctggaagatcgacggctccgagcaggctccgacagtcagttcggggagagaccgcagtaccaggtatagctgcaatggtgggtgggtaggtagtacagtagctgtatcgatagtaatgaacgttttcgtgacgggaaaaatcacggtcctccaacgtccgccttgtgtgttgcaagtccgtcgtcgtcgtccttctcctcctcctcctccaccctagaactgcgagcgcagtcctcctttgctcttgccgatgtgcacgggcagcttggacttggcgtcttggcctgagcgcttcggctttcggaacaggatgcggccatcggcgccggtagctgctcgaggaggagtgtcgggctccttggcggttttctgcttcttgttctttgacactgtcgatgacggagcggacggtaaccccagcgctccagagctgcccgatatcgctccgctcacttccttggcacggtagaaatcgggtgcgagatccacgagccaacgcggatcaatgcgggacacgtcgcgcacgaactcctccgtggtgagcacgctctggtggaacaggatccagtcgggcagcgtgcccatgtggtagtacacggacgtcgggtggagctgcaccggtcgctggtcgcgcagggtgcggtacactccgtccgcgtgcagcttagcagcattcgcaaagtagccactgaccaggcacttgcggatgacggcactgcgagccttgtcgtcttcgtcgttgccactgccaaggctcacatagtcttcctcgccgccgttgccatttccaagcgacttgaagcgagtcacgtaccgcttgagatgccgccgaatctccgtagctcgcaacagtgcgcgatggctcagcaagtactcgtcacaccacgagcggcttttgttgttgtccacgaactcgtcgtatatcgccaggtacatcatgtggtcaccatccggatgagcaaaatgctccatggcctccgcgattttctcctgtcgctctctggaaccgcgtgaagccaggaaaacatctccaactgataagacactggcaatgctcagtatctcgcgtgtacagtcgaagcggaacgacgacaacagcaccttggcgagcgctggagccactggaaactcggccatttgtgtgcccagtggatctacgagacggcagtccgtgtcgatggctccaagcgagaacaacagctccagagcgcggatcagagcttctggcgacggagacgacacgaaatcgaagtgtgccaggtcctgaatgcccatgctcagcaagtacaacgccacggttgccagattcgtccgctgcatctgcgggatggtttccttggcgagtttggtccggaagtgctcttgtgtgcagaggcgaaagcacttcccggggcgtgaccgacctgcgcgtccagctcgttgctttgccgaagccttagatacaggcgctgtaagcaacgcctccactcctgtgagcgggttgaaaaacgcaagcttggtgaagcacccgtccaccacgaagacgacaccctcgatagtcacggacgtctcggcgatagtggtcgccacgatcaccttgcgtcgcactcctcgaggcgccggcaagaatgcgttctgctgcatgtgcagtggcagcgtcccgtacagaggcacaggcagcatatgagttggggctctgtcgttgagcgctctgacgacgaaatcgatctcttcttggccaggtaggaacaccagtacgtcaccttccccttcacgctcgtcaattgccagcactgtgtcgatagctttctgcagataatcgccacacggttcctggaggtactcaatgtccacgggaaactgtcgtccttccactgacactgcaacgacgtccttcagcaccggcgacgacttggttgacccagtttcaccgttctgccccatatccttcctctttgagcggaagaaccgcacgaaagtgtccacttgcaacgtcgccgatgcgataatcacccgcagatccggccgcttcctttggatcttcttgatcagcccgagcagcaagtccgtctccaaattccgctcatgagcctcgtcctagaatcaaacgaaaagaaccctcagttagtacatcacttatatcttaaatcctggccacacacggttgccaacataccagcatcacgactgagtagcgcgacagcagcgggtcccgcatggtctctctcagcagcagtccgtccgtgacgaacttgatcttggtgcgctccgggtcccacttctcctcgaaccggacggcgtagcccacctcctccccgacccgacagcccatttcctgggccacgcgacccgcgatcgtcacggcagcgacgcgccgcggctgcgtgcacacgatgaccctgtttctcggggtttctgcattaaattgggcccttctcggctgagacgccgcccatccagcctccagcaggtactgcggcacctgcgtcgtcttgccggagcccgtggcgcccacgaggatcgtcgtggtgtgcgtctccaccgcgtagaggatctcctcgcggtgtttggacaccggcagccgcgctctctgcgcgcgcagcgagagcccgtgcagcgggttgaactgcaccgccggcacctccgcgtccttgggcaggtctcgagccgcttcagcctcggctcccgagccctgcagcgtcgagccaggtcgccagaacgcagccatccttgcagatacacttgccttgcaggtgcaggttgcagtccgctgtaacatcactatttcgagggagtgaccgattttcgctgtcactgtttcgagagagtgacagtttcgagcggttcagtgaccgggctgcgcgttttaaccggttaaccctcgtcctggaaatcgggaccgccgaggccgatcggatggctggcctcggcctttcggcgccgaaaatcccaatacggcagcactagctattaaacagggagcgtagtacaagtcaccatggtaagcctgcctgcctctacaccaacatgatagcctgagtatgagcctccggacgcgacggagctgctactgctgcgggtgctagcgctggtgcattcaattccgacgtggcggcggcaatgcagcgcaaaggaagcggaggattggacgaacggagcgaacaataaatacagggacaacacaggatcaatgcactcaggcgccaatacagcagcagcagctccagctccagctccagctcaatgggcagacagcgaccaataccactacaggcttcattctgtagatggagagcagtatgaagaagatggtgcattggtgctaacgccttgttcgcgtttgtgttgctgatgccgccgtgcagccgccgaagactcagcagaagaccaaggagcagaagatggccgccgccatggccggtggcaagggcaagggcaagaagaaatggtccaagggcaaggtccgcgagaaagtcgccaacaaggttctgtacgaccaggagacgtacgagcgcctgctggtggaggtccccaagatgaagctgatcaccgcctcggccatcgtggagcgcctcaaggtgaacgccgcgcttgcccgcgcctcgatccacgagctggaggagaacggcaccatctcgaaggtgctggcccaccacgctcagctcatctacactcgcgctgttgccgccgaggagtaagaagttgctcaagttcgatgatggccgccacattgaaagctccgattgcccgccaactgcctcttctaggggggaaacgtcgttgaagaatggatctacgcgattgctgctcgatggcgaggacaggcgagcggagcaggcacaatgtgtcccgtgtggcgaaaacaccgcgctcctagtagtagagtgaggacgtggctcctttgccgtctcctgtcgtcgtggtaaccccgcagcaaaagagcgaaaatggaacacgtccctccctgtttaacttactggtcctcctctatcggctctgtgcgtcttcccatccattgcgttgctgtgtgtgtgtgcctgttgtagtgctacttgtcaaagaggttcgcgaaggcgttctgctgcttcttgcggagctgcgtcctggctgcttgagcgcgcgtcaacgcagatcggaacaacttgttgtccggctcaagctcgcgcagcttggtgagatcagccaccgctagttcaaactccttggacgacacataagcctgactgcgacggtagcgagccttaacgtgcgaggcatccaggtccagcgcgctcgacgccgcagcgatgcagcgatccacgtctccgtcgccgtccagcttcgaatagcatgtagccatgttggcgtagcacgcgacagccacagggttcacgagctgcagctcctccaccgagtactcgaccttcgcgtccagagtggcgtccgaccgcaagatcggcggctcgagccacgccaacgctcgcttgtagagccgcacggccgcgctgtagtgctcctgcttgaaggcctcgttcccgcgcgctcggtactcccccgcccgcgccaacttccacgagaaccatccaccttcctgttcgcttactgcagtctccgcttcaggctgcacgtccagctccagcttgcaaaaaagcatagtcttggcctccaaccccaattctgcagccctggagcctaaagtgagatctcccacggcgacggggaccgcgtcgttgcctaagtacattgaagcttcattgctgtcactcctgacaccttgttcccggtccagaaggcactgcagacgctgctggagctccggaacgagctgaatcccagtcgaatccagcgcgaaaagcgtcgagtttgcagcgctgtcaggagagttcgggagcgtttgaggctgcgcacaccgcacctgatcaacagggaggcttccgctcaacaaacaagctgtctccgagcacgccgcgtctcggtagagcgaccaacggatgcatccagcgccgcgatccgtggtcatcttcggtggtgatttgctaaatagagtgtaacctcaatgtatccattcacgtaaccattagcaagtatctacgagcgctataccagccaagacgcagcgagcgctagcgccgttatagctacactaagtgatgcacgagagctcacacatggatacagatggtcccattcgtagcgcaggcagttgaagtcttcgagctggcagccccagtggccgcattcgctcagatgggtacacagcaggcgagcggagctctcgaggcagaagtcgtgcctcacgaacgtgtcagcagacacctcagtgcacgtacagcgcgatagagacagtgccttcctgtgcagttcgtcgctacggagacactcgtccgagcacatggccgagaagagatccgcctgcggcacgggtccgtaccacccagctcgagcgttcttgaggtacacgatacgcgactcgcacattgtagcctggatgaagatgtcttggccgtcctcggactcgatgaagttgttgtagatgtccaggtcgcaccccagtccttctaccagccgtcgagttgctgcatcgctggcgttggacgacgccatcgacagcgccgtcacgtttgaagccgcagccattgcgtgaagcggtagcgaggcttggattgtacagcataaccatactaataaaagggaacaccttactgctgtacgtgtaccaagcaatgtttctcccatgtcgttcgtgctagacgtgcgcgatcctgatgcccgttgcgtcgtttcgcctaagttcgctttagattcgtgttaagtgcgaggtcacattggcgttggtggtcatcgccaggatggaggagttcctgctgcaccactgcgtcacgtcggacgcgcccaagtccggggacgatgccgaatctcaagcttcgccttcaatctggcggtcctcggggcgagcggagtgcgtcctggtgcaagaaaaccgccacgcgcatggcgcgtctcgtgtgatcctgtcggccatgctgaagctcttgctgcagtccgccaagacgtccaacgtgctgctgctgacgctggtacggcgtacgaagtctccgtggctggtgttgcaagcaagtagaatggtgctgactgttgttataccgatgaattgctttgtattaacggcgtgcaggattcgcctcacgtggctcaaggagttgaagcctcaaacaagttcacgcacgtcgactactctgccgacgctagcaacttccagtcgtccattgcaggctctcaactagtatctacattgatgcgtgatattgagagtgttgaagcgaaagtccgcctgaagggagcgacctctgcacggccgatggtcgtggtgctggactcgctgaacgtgctgttgcagcagacgtcactgcaacaagtgctgctgtttctgcgtcaactgcgcagccacgcggtcattgggtcggtgatcgcgcgtttgaatgccggtgcggagtcttctgaagtcgcgctagcgcttgcggctcaggcgacagcgtcggtgttggtggaaacacgttcgtcgctacgatcttacccggtcctagcgaaggagcgaaggcgcgagattccccagggtatgcacgggtttgtgctgctggtccgacagaagaaggtaattgactccgctagtggctgtagtctagtcctcccctctaacaatttaatgtgctgctcttgctcccccagaatggtcgaagcagcgaaactctcgagtacgttcatgtgctcggtaaacagatcgagttcgttgctgccggtgacgtcgacagccagtctgccgcggtggattctgctcccaagcaaaaggaagccggcacgaaggcatcgctggcaggcgccaagatgtcagagtttaagcggaaatctcaacctgaagcaaatcccatcacgcccgaaaactctggccaagccccactccccgttcggcaggaagaggtgagcttcaacttgtccatcagcgctgtggagcaacgcgcgaaaagccaagtccaactgccgtacatgcaccaaggctctggtggtgctagcagcgggccaaatgcaaacaattttggcagcaatggccctgctggagcgaacaacgcacttttcttcattgatgaggacgacccggattgggacgacgatgatctcgatgacgacttggacatttagacgtttaaattaaaagtaaacggacccgcacatcatcatcttgcttttgtaggtagctcgtacaaacttctgtctcgaagtataatatctttttgtcgcgtgtctgcgtcgtcaaagaagctcttcagcgagcaccgacatgcttgcgccaactgaaaacttttcgtcaatttatcacgatagtgtagtctctactgtatatcgagatggagaagaacgtgtagcgtctcgagatggagttcgttcaaacatggatggcagggtctctctactcctgtacaattcctcaatgcagcgctacaagcgccaaggaggggggagtggcctcgcgcgtctccttttcgcgttgaaagaacgacgatcctttttgtagtgatagcctcgcatttttatcactattcagaggcatagatgtaccatattggcggtacagccgaaaaggtggccgcgaacttacatacatgtgaggataagatcgcgccctttcggacgttttcgctgcagaaaacgagcggtctttccgatacgtttccgtaagttcgcggccaccttttcggcgagtatggaacgtaaagtaccaatttttggccctcgattcttggtctcttgaagtttgtagcttgcagctacaaaacaggtttcttaccttaactgaagtcgtatcagtttatacatccctaatatcggttttgaagttcccgcagaacacggcgatgagcaggagcggccgaaggtgtcgaagttgtatgtaggtccgcccgcagtgtatgcggcgacgacagcttgtgctggccgctgaagctcacgtccaagttgttgaacacaagtttccccgtagtgcagaagaccacgaccatgtcgaataatcgctccgtgctgctcagatagatgcagccccaagagcatggatgaactggatggccaagcgaccgaagcctgcattgccaatgacaccgacgcggtcgcgagccttgacgttctggcgcttcagcggagagaacacggtcgcactagcgcacagcagtggagcagcaacgtccgacagaggcgaacgcgctcggcatgcgcacgtagtcggcgtagccgccgtaggccatgacgccgtcgtcgtacttgaaatcgtgcgtgagcacagctcggttaactggaccttgtcggcgcagttgacgcacggcttgggagggaaagagtgccacaggacagctacaagaacatcggagggaagcggtaatcgagggaacgcgtcgaagcctcgtgtcgaggggttttcaaggacattcctcacgacgagcataagaggaatgaggaaccagctcgcggtctcctcgtgctcattcagcagcccctccatgagcacacgctgctgctatgaggactcgggaaatcgagaactgaagcggggctcgggcgtctgaaaaccatgaacgagagggacgagagcgatctggccacgcatcagctctgcgacttttgttcacggactgtggatcttcttcagctcaccgtgcaggggtaatggatggcactcattgagtcacatgcacagctgcagtcttaccacaaatgtgcggcacgtcggcgcgctacctaagagccctgggcacgaaggagaccagccattcttgcccaggcccctaataccagcttcgtgtttgtgtggataacgagacgccggttggctgaagctcaacgcggggctggaagctgcactttatgactgtcgagaccgccaagtgatgatactcaagcgacgagactttcggagctcgacacggacacgccgcgctctattcgaagcgggtgacgtacaccgaaaatctcgctggtcgacgagttgtacccatatcttgaagagacacatgtgtggcacacaaaaagatacgaggcaaccggccgggcagcgtagccctctcaccaagagacctcgccgcgcaggacacactcaacgagagatgcggcacgtcgtgacagccgcatgggtggcgctcggcgccgtgcacgccgcgtacgccgccgtgtcggtgccgtcggccccgctgaacgtggcgctggatgtgctggggcccgacgcgctggccgtggcctgggaaccgcccgcgacggacggcggctcgccggtgtcggcgtacctggtagaatgggacccggacccgggcgtgcgcgaggtgcaggtggtgcaaacgagcgccaacacgggcgccaacgaggtgcagaccgtgcagacgtacgccggcctggtcaaggagcagcagcgcgtgacgacgagcgccacgccgacgcccgaagtacagacgatcacgacgagtgcagcacccggggagacgctgggaggagtcttcacagtgcagctcgacaccacagcaaccggaggcagtgtgcagcgctccggcgtgatcggattcaacgcgcaggagtctggagatcggtcaggcgtgatggagatcctcaattcgatggcaaatattggaccgacaggtgtgcagagtgtgcagaagtcgacggccgacgcgcaggggggcatcacgtggaagatcacgtttagcacggcgctgggcaacgtgccacagctgacgctctcgagcaactttctcacaggtagtggcgcgaacgtggtgctgagcacaccaacacaaggcaacgtgattgccggaggcacgttcacgctgggctttctcgggagcgtcacgaaaagcctcgcgccagatattacggatgccggtatgcagcaggcgcttgaaacgctcgacaccatcgagtctgtggacgtcacgagagttggcccagacgcacagaacggctactactgggacatcacgttcacgggagagtcgaactcgggcaacctaccgctcctgacggtgccgtccaagtcgctgaccgctgtaggcgcaaatgtggtggtcacagagcggtccgcaggtaaccagctcaagggttcgttcaaactgagctacaactcggcttggacagcggatttaccttacaactgcgacgctgcaacgatgaagagcgcattggaagcgctgggatcagtcggcacgctggatgtcgtgcgctcggccaagccagatctgcaaggcgggtacacctggaccatttcgttccttacggagaaagggtcactccttcagctgggaaaagatatcacgaaccttggcgagacgcgtaccgatggcgcaacatcatctgtggggctgctcgtcacgcggacacgacccgggaccgttcaagaagtgcagactattcaagtgaccacggcaaataccaatgtaaaaccgacgacatctttccagctccagacgaccttcgcggggcagacgaccaccacaggaccgatcttcgccaaccccttaggcggcggaacgtgcatgccgacgcagcctgaagtccagcaaatcgccgtcactactgtagacacgacgggcatcggaggagacgcaatcgtgtccaagcagactgcgattcatctgatctacacgagtaacacagagggcggggccatctcgaagactggaccgatttatgttgatcaagcaggcgatggagactgtacgaagggcgctacttcgatagctgccgagctgagcaagctccctggcattgccggccctgtgactgtgagctcaagtgcttatgttgctacgcacgcgtgtacgtggctagtgacgttcgccaaccagccgggcaacgtcgttcaaatgaaggcaatgccagcttcgagtggcgcgggacctgcgactaccgtcacgattggagacgataccatctcgctctctaccgtcacggacggcaccatcaacatcatcaaaacggagctagagcgtctgacgaacgtcgcccaagtcaccgtcacggccacgcctggagcgaagcagacgtgtacgtggagtgtcacctttgacggcaacgcgggcaacctgctgccgatgactgtctccatagacggaggcgtcacctttggcgctactggaacggtgagtggggacacgatttccgtccctgtcgctgcagtcacggacggcacttcttctgtactcgggggcgtcttcgcgctggagtttgagggccagcgcacgggctacatgccgttcgacgcgagtgccgcagtgatgaaaacgcagcttgagatgctctctacaatcggcagcgtggctgtcacgaggtcaagtgcggatcctaataaaggctacgcgtggactgtgtccttcttggataacctcggcgatctgccagctttccaaccagacgcacttgccctcaccggcacaacaccgaagatcgacgtgacggaagctacgaaaggcgtgctcccgcctttcaacagcaaggaccgagtcaccggactcagcttcgacagcctcgtggtgaccgacctcagtgacttgtccgtgacagcgtaccatgtcgacgagaacgtcccgttctacttccgcgtgtcggcgatcaacgccgcgggggtaggaccctactctttctcgacaccgcagttcggcgtgcctaccgctcaagttcccagcgtcccgacgaatgtctctctaacttctgtggacggaactaccatcgcggtgagcttaagctccccagagaatgacggtggagcgacgctcgactcgtaccgagtcgagtacggctcgaaccccatcgtggacgaggtgcagcaggtccgcttggttgttccagtgacgaacgaagtccaaacagtttccacaacgacggccaccatgggcgaagtccagctcgtgcgcttgacgaacacctacaccggctcaccgaccagcgagatccagcaggtgaactgcgacgccgacagcaccacaggcaccttctccttcaacttcctgggggaaacgacggctcccatccagtcgagtgagacgtcgaaggcaaagatcaaagctgtgctggaggagctcaagtcgatcaccaccgtatcagtggtgttctatggcggacagacgacggcttgtagtccctgtcttgctttgggctgtacgtccggcttcaaggttacgtttacagcagtcgtgggctatcagggagacatgccgatgctcacagccaacacgtacgacctcgtcggcaaccgtcgaatcgatatcaccgaggctactaagggacaagcgcctgtcagcggcacgttcaagctgacgtacctgagaggcaaagacgcagacaccgtgccacttcagtacaatgtcggcgtggataccatgaaagcggccttggccacgctagatgcctcgatgaccattgtagtgacggacggaacgaccgcgttaccgcaagccaacagagacaggggcgagcggttgtggcgggtcaccttccagaacagtgggtatgtccccccaatgctcctccgaccggcgaacaacctcctccagggcaacggggccggcattatcgtgtacacgaagggcacgacgccgttctccggtgttccggcgtcggagcctggcaatcgagtctcgggttacttcaaactgacgctgggcggacacacgaccgaccggatcgaccacgacgcgtccgacacgaccatgaagagcaagctcgaagcgctgcccaacatcgggacggtggcggtgacgcgctcagcgccctcactgaagaatgaatactcgtggactatcaccttcacctcgaacccgggcagttccccgcttggcgcgggcaatatcgacactttggtgccagactcgacgttgctgaaaggaacgagcagcctagcgtccgtggtggtgactcagcagggatctttgcctttggatggcacctttcagctagcgtacacagtaggctcagttacccagactactgccaacttgtcgccctatgacgccggtccagggattcaacaagcgctgcagaccctcccttcaattggaggtgtacgtatctcgcgccagacgaatgcggacggctactcgtggttcgtcaccttcagcgggtgcaggcaaaacccagcgatatgcaacatcggcgacgtcagcatgctctcgggggtgacccccaccaatctgatcggagggcttggaggtgcggtgccgactgtagtggtgacggaggttgtcaagggtgtcgcgccagcgagcacggttctcgtgacggatttatcaggaggagacccgttccaaacggtaatttccagcctgacctacggtaccaagtacttcacgcgcgtctacttccacaactccgtgagcttcggagaccgcgcgctgtctgtaccagagtttgtgaggacaaggaacctgccgcctggcgcgccttggcctgtgacgctcgtctcgtcaaccgcgacgtccattaccgtggcgtgggaggccccgacagtgaatggaggtgccaccgtgagcgggtacgagctgtggatctcggagtgggccgagtcgtcctaccggaaggtctacgaccgccccaacgacgccgtcagcctccagacgactctgcagacgaccgcggacaatgtgattgaatcgggacacaagtatctgttcaaggtgcgcgcagtgaacttctgttcgtcggagaacaccaacgcggcgtgctacggcgccttcagtgagtctgtcgagtacaccgtgcgagcacccgtggttccggatcctcctgcgtctttgacgcgagactctcgaaccacgatcaacaccaatatagcgaatgacggcatcgcttacgtcaactgggaacctccggcggacaatggtgggtctcccgtgacaagctacaagctgtacatggacgacggaacaactggttgggtgcaacaaacgccgctgacggacacgtattcgcatcaggtgactgggctgacagagggcaaagtctaccgcttttacgtgattgcagtcaactctgtgggcccttcgggacgcagtccggtactggcgctggtgctggccaacgtgccgtcggcccccaacgctccgacgatcacggacgtgtcagcgacggcgataagcgtggcgtggcagccaccggccacttgcacgtcgacactcaccggctgcaatggaacaccgttgctcggctataggctgtggcagtttgcaggcgtgacagcgagctacacggcgtccgggtctccagtcaacgtggagattcagcgcatccagacgacggtgagcaacccggtaaccgagattcagaccgtgacagtgctcggcgcttctggcaagttcaaactctacgtgggctcgcagcccacgccgcttctgtcggtgactgcgtccgatctcgaggtgcagacggccttggccacctgcggagtcaacccgacgagtgtgacgcatacgtcgccggctacagggagagcctggaccatcacgttcgcgctgacggacggccccctcgctcccatggtgatgaattctgacctgctaaccaacacagtcgcagccgtagcgtacacgacgtcggtgactcgagtgcagccaggcaccactgcgcttggaggggacttcaccgtctccttccgaggctatgaaacggggcacctgtcggtgacgacgtctggcccagacatgaagaggtatctggagaacctgccctcgatcggcgtggtgcaagtgacgcctacgacggggacgaacaacgcgatgatttgggacgtgacgttcgtgacggagctcggggacctcccgctcatgaaggtgacgagtggccgactgaccggcggcaatcctaccatccaagtgaccactaggcaagaaggaacaccagggcgagtggtctacgatggagcgacttcgcctgagatcctgtccttcacgtcgacgaacttggtgccggacacgttgtacgcgtttgttgctgtggccatcaacgctgctggagaaggctacagcggaatctcgacgcctgcagttgctgcatcgcccggagcctcgagtagctacaccgaagcgtacggagctgcgctactacaaggaatggctggcatcgtgtacgaagtgcagagtgtgaagacggtgaacctggcgaccaacacgttcactctgcagtggggctcgtcagcaccaacgtctgctattagtacgtccagcactgccagtgacctcgaggccctcctcaccccaagtctcggagctgtttacgtctcacgtgtcgatatcaatggcgctgactgcgtgtggtacgtcaccttcacatcaattgtcggtgacgttccgctgctggttgccagtgacacaacgcgcgtcaaggtcgaagagttcgtcaagggcgaagcgaatgagtttaccattgcgccccggaaagcctcaggcggcgtggtgacgtacgccacgctgcccgccaatttccaggggaaggatcgattctggacggaactgtggtcaacccctccctccgtcattgacggcacgcacgaattggtgtctgagggcggcctagcagtgtacaaccccgtcgtgtacgagatccagacgctgaagttcaacgccgcaacaggcaccttccgactgacgttggacaccaccacttcccgtcttggcggcgtgttatcgacaagcactgcagcggtggatgccgccatcctggcagctgcaagtgacgcgaaggctgcagacctgctcaagaccaacatcgagacgctcgccaacgtcgaaagcgtgctggtctcgcgagtcaccaacactgggccggcgtcatggacgtactccgtcacgttcgtgaccgatctgtgtgatctaccgccactacagcttgtcggagacccaaccttcgtggccgctgccacgacactcaccatcaaggagcttcagaacggagtgtgcgacgtgcagaccgtgacgacctcagcgagtgtcgaatctaccgccgaggtgcagtccatttcgacgtggctggacgtcacggggtctacgacgtcgttgggtgggtccttctcgctgactttcgcaggcatgggtagtattacggtgccctacaatgccgacgccacgacgatggagaacttgctcgagtcgctcaatgggatcgatgacgtgacagtgacggtgaagagtaccaactacgcggcgccttcaccgtcgacagcaacgaccaccgggctgcagacgtggaccgtgaccttcaacgagatcctgggtagcgtgccggacatcactgtgaacttgccgactgctctcactggaagctccgctactgtcaccatccaggaagtgaaacgcatgggcttatcgctaggcggcaccttcgtgctgaacttcatgggcggcacgacgcacaacttgccgttcgacatcgacgccgcagagttgaagcaggaactgaaggcgtcactgagcaacgtgcgggaggtggacgtccgcaaggaagagcgctacaatggcaaccgctggaccatttcgttcaccaagaacttgggcgatctgccgcagctggaggcgtatccgctggcgtacgagatccaggaggtcacgacactgggagggtctcccacgccactggaaggaacgttcactctgtcgttcctaaacgaggtcacggctccgatcgcgtacgacgcaagtgacgtggtcatgaagttagctctgcagtccttgccctcagttgggctggtagacgtcacgcggtcaagtaagctcgacgcaggcaaccgcttcgcatggcaggtgacatttcggactcaactgggcaacatcgggatgttggtggctgacgcttctgggctcacggggagcttcccctccgtcagcgtggtcgaaaaacaggctggcaacaagcagtcactgacgggccaattcccgcaacttgcagtcttcaagaagcagagtgggctgccaagctacactggtcgatacatcccgtacgaggcggcagacaactacaccgtctcagtgcagcagcttctctccggtggtctgctggcgctgtacttcgacaactactggctgcaggacgagcctgtgatcatgcgcgtggacccgcagctaagcttcgactggggccagggtgctatcaccaactacggcagggactacatcagcacccgctggttcggtaagctcgccgtgccagccactgatacctatgtgttctacgtgtcgtctagcgagggagtgcgagtctggctgaatcaccagctgcgtgtggacacgtgggaggacggcgaagacgacggaggaactgttgaaaacttcaacgagccgctgaaggcaggaacgttttacgatctacgcgtcgagtaccacgaggcgacaggagtcgctgcgttcaagctgtcctggagctcgtcgtaccttccgattgcgccgatacccagcagcgctctattccacggcgagcacatcgctggcagtccgtactcgatctctgtcacccctggagcgacggatttcccctacacgactgcgttcggcgacggcctcacgactgccacagcgggagtaacggcgcagttcacgatccaagccaaggaccaaaacgacaacaacaagaccatcgacggggacgtctttgatgtggagatcaaggggacgagcactggtacagcggcgggagtgcagctagcgccgttcgaagagcctaagtacatcggacaaggccagtatctggtcaggtacttgccctctgtgagcgggacctacacgatatcagtgcagacagtcaacggcatcgacatttactgcgggctgggcaagcttcacaagtgcagtccgttctccttgacggtcctccctggtccagccacacctcacaccagccaggctctcggcaacgctgctgccaccgcgtatggagtcattgatgggctcatcgaagcagtggctggactcgtatcaaactttgccatccaagcgcgcgacacgtatgccaacgctgcagacgccgacgacgtgttcgagacgaagatggtgcttcaagctgaccgaagcgtgcaataccgcagcaacgtcctcattcctggccaactgggtctctactcagtggagtattccgtgccgcgcgccggtctgtacgacatccagacgtacttgaacggcatccccatcctcatgtgtccaggaggtggcgcgtgcttaacgctcaacacgccggcgacgctgacggtcgtgcacagctttcttcatggtccgagttgtacggtggacgacacagctaccggcgcgttgagatccgccacgagtgggcaccaaaccagctttaaaatctacgcgcgcgacactttcggtaacttgcgcaagggagatcgaacgacccactcgctgacaacgggggacggcagatccgacgctttcctcgttacattcagcggcaagggcgaggagttccgcacgtcgactgccgtccagacgcttacgagtaccggtactgccgggtatttcaagctatcgtacggcaagttcaggcagcagctctgtcctctctgcgtgacgactctggcgggagacgtgctcactatgaccacgaatctcgtggggattttgctgcagggcacaaagttcgtggtgcaggagtgcatcttcactgctgcaagtgtgacgacggcaacagtcggcggagtgacgacgtctacggtgacagtggtcacgaaccacggctgcgcggccttcagctcgaaaaaatttgctcttcaagtggcggcgtcatcgacggcagcttctgcggcgctgaccccgttgattccgcatgatgtgagtgcgtcggggctgcgatcaatccttcaggacctgcataagggagcgcaagtggcagtcacgcgcacggcatcaggcaccggctaccagtggggagtgacgttcctgtcgcatttgctcgagtggagtgaagctcacctcgcggtggagtacacgaacggatacgcgctcagcttgtacgcgaaccctctgcaggtagcgtacacggcggctgcaggcgagtaccccgtgaagtacacgcctcactacgctggctcgtactcggttgcagtcacgacttgggataaagcgatccacgtcaaggggagccccttcacagtgctcgtagccgacgacgtgaccgacggcccaagctctctatctgccactggcgactggcgcaccgaaaactacagcgttgctgcccagaatatggtgattgaggcgggaaagcccatgttcttccaggtacagctgaaggatgctcgccgtcttgaagagcaggcgattcgactacgagcagtggtcttagctccggtgcaggaggtgcagcgcgtgctcgtgacggccgccccgttcaaattgagcttccgtggatcccccaatacggctcaactgaccaccagcagctcctttaacgatatcaagactgctctggaagctctgagcaccatctcgactggcggcgtcacggtaactccggagaatgccgccgacacgtccgttgtagtgacccacgcgttcctcgtcacgttcacgaaagccttgggcagtttgccgctaatgacaagttctaccggcggagtaacagtgacccacgccacgactggcgctgtgtccgtgcgacaggagactcaaaccttgaaatgtacctcggctgtggccatcgggtcggctggatccttggctgtgtcgtataaagggggtgcgccggtggatgtcaccgccacaactacactgacagctctcgctggaagacttaccacactggtgggctctactgtgacggtagtcgcggaggatggagctcaaacaacagtttgcgcgcagactacgtcgtctcggctcttcattacgttccctcaactgctgggggatgtagcgccgctgacgtattcaaagcccaatggaccccagctaaccctggtgagcgaagacaacacggacaactcagtgagcggcatctatccggcctggggcacgttcaagctctcgttacccgggagtagcgaatcgactgtagcgctgccgttcaacgcgttggcgtccgacgttgagaccgcgctggaggctttgtcgctggtggatcaagtgacggtgactcgagatcggttcgacataaccacagagccggcggcggcgaaacttgtcacgctcgtgcagtggacggtggcgtttgtcagccactcgggcaatgtgccggagcttgtgccggacttttcggggatcttcatgcacgacgacggccagcacaccccgtttgtggagactgtggagctggtgcggggatccgtggggaacaaccgctccttgaccacaagcgacaccacggtgactatgactacgacgctgcagtacccaggcgtgcaggaagtccagaagcttttgtgtcgcgggagcaagccgttcacgctcggaaatattgctgtgatccaaccggacagttcgctcagcgagctcgaatcgagtttgaactcggtattactagctggagttcgagtttacgcagtgtcagaggtggacggagtgcgtcggccagctgcagagctgtcaacagcagccatgttcacccccgtgtgcagtgtcgcctctcctcgctggattgacattgtgttccagactccagcggacgttccgatgatcgcgtggagctcgacgactaacgatatctacatcaccgaggccgtgaagggcgttgttcccagtgcgacgcccatcaggatctccaacacggaggtccaaaagctggtgtgccaagtcactgctgccgcggcagctaccgctttgttcgacctggtgtttgcaggggagcggatcacggtgggggccaatacggcgccaagtgcactccagacgcagctcaacggtatgaagagcatcactcgggcgggcggtgtcgttgtcgcgaatacgccagctcaagtctgctcgaccacgacgcctctgaccgctgtggcaattaccttcaacaaagtaggcgatcaaccgctgatagcagtatcccaagtgcgcgacggcatcgtggtggcacaagtgaccgaggctacgaagggtctgacgtcgctggtctacgatggctcgcgtaaggggctgtttaacgtgacggccacaccgatcattagcgggacgtatgctctgggcgtgacggtggtaggtcagccaacgttctgccctccgacgttccaggtgcagccgacgctagcgagtggagcgacaagtacacacacagctccgactgtcgtaacgcagggcgtcaccgagtggttcacggttcaagccatcgacaagttcaacaacctcctcgaatcgagcaccgaattgggtccagacgccttcgtcgcaaagctaactggtcctccaattggagacccacccgcagttcaggatgaagcgtaccccgtaacgattacggagcgccaaccgaacaccaacggcgtcttctctctaagtttcctgccacaacgcgccgggctgtacacgttgtcactggttcgacgacaggcgggaggactctgggcgacgtatttctctacggctgactttgcagacgtctatttgagtcgccaagacgtgatggtagcgttcaactggggagagacgtccccactgggcgatccgttccccaacaagaactattccatccgctggaagggtgagctacgcgctgccgtctctggtcaacacacgtttacgcttcgggcggataatgccgtggtgctggtcgtggatggacaagtgctactcgatctgttcgctagcccggttgtgtcttcaagcatgaacaagttcgaatcgctaactatcgacctagaagagggggagttctacaacgtggagatcagctatcgcactaaggacgcccagtcgttcgtgaagctcgagtggagctgcttagaagcaggcttgacccgttccgtcgtgccttcgggttcgctgttcacgtccacagctttggtgaatacgccgttcgccatccaggcctacccaggagtgatcaacgcgacccaagtgcgcaactcgttggacggtctgacgtcgacaaacataagcgacaagcccatcgtggtgaacgcgctggacacgatgacattccagctcgaagcgcacgatacatttgggaaccgccgcttccagagcggcagcgattcgttcgaggtgtcgatggtcggcgttggcggctgggcgctgagtggacgcgtcaatgatgtgacttacggatccgctgtccagctcgaccccaccttcatctgcaaggcgtgtgcagtcagcttcgtcgcgagtacgcgcacgctgaccttgaatgtggacgtcgcgagtcgtctggaagctggggtgcgattccgagtggttaacgccaacagcggcacattggcgcgcgatcgagactgcttcttcgttaccgagagcgttgtggggccgtacgatgcagtggccgcagctgtcgcagtcgttgtggtgtcagcaaacggctgcgatcccttctcaggctcccagttcgacctttccgctatcgcaccgacagactggaactacctcgggacttgctctgtcgtgcagaactccagtgcgctcacagcttgtagcagtaatttcccgctgaagcgaggtgaccagattgctgtcgggcgcgaacttcaccgggtgcactacacttcgggactgtttgacgccatggacgtgccactgcaagacccgtatcgaggagccaccgccgatttagtgcccgtcttcaaggctggagatacaacgagccgccatacggttgcgatggtgccgtacgtgaaagggtcgtatcgactgagcgtgcgattgccagctatcaacgcagttcacgcggtcattgcgcaagcagattctgcgcttggaggctccttttacttgtccgtggcaggacagaaaaccaccgcgctgagttacaacgtgcaagcggctaacctcgtgacggcgctgggggctctctccacggttggggtcggtaacgtggctgcgtcactctcctgcgtcagtggagctgctgcgcagggctgtcggtggctggtaacgttcaagcagttatcagaggccgtggctctcagtcttacggcctcctacaccagtacgctgacaggaaacaacgctcaggtgattgtgcgaacgctcactcaaccgcgggcggcgcagatggtcaacgggttcccgaagaccattaaagtgagccctggcaccatgaatccgagcgtgagcacagcgttcggtgctggactgtatgctgctacatcgggtgttctggcctcgttcttcgtgcaaatgaaggacacgcacgggaacaaccaggagagcgacaacaacgcgctgcaggtgcagattttcccagcagggacgacgtacgtgagctctcaagtggcaaaggtgtcgagtgttgactacgtgtcggaaggcctgtacaacatctcgtacacgcccgtgttgtcgggccctcacacggtggtggtaaccgcgcagactgcgccggaagtgcacaaggtttcgtccgcgttcgtatctccaggcacgagccgcggagggacattcgctctgcgtttgttcggccaaacgaccgcgtcgctggtgtttgaagccaatgcgacggacgtgcagcgcgcgctgctgagtctgcctgtgtttgcggccactgaccagaactcaacagcgcagaccaccgccatcagcgtgacgagagtcgtcaacacgcaaaacgggttcgactacatgatcacgtacacgagactgccgccgtcgttggagctggagctggtgcagaccgtcaacaatctctacagcggtaatggagctggtggcgcgactgtgacggccaccgtggagaccccacagtcccgtgaacacatcaagacttctgtgactcaagggaaacccattgtcaatgagcagcaacaggtgacgttaacctcgaccgctgcactgaccggcgggtcgttccagctgcagttcggcgccgacgtgacgaacttgatcccgtacaacgcgccaccggctacgcttgagagcttgttgaacctgttaccgtccattggtgcgaatggcgtcagcgtcagccaagcgacagtaacgtcaaagctgcgtcagtgggctgtcacgtttgtaggagcgacagcaggaaccgctcagactgcgttctggaactcggccttgtacacgcccggacggatcgtgcgccacgcgagactcgtcggcgacatcccagtgctggcgcctgtgctgtcgaacacgctcgttgccggcgctactcccgatggccaaatagctgtgaccgtcacgctgaatggtctcagcccgttcgtcacgatcgttgcccacggcgcgctcgttccagccaaatgtaccgctgtggatggcagcacgcccttcacgccggggtcggtcaatgctgtcggacaggacggactgcattcaggtcgattccactcgcgctcgagcttcatcatcgaggcgcgcgacatcaatgggaatctgctggatgggactgggggaggagtcacgggatctccgctgcaggagcttcaaatcgtcgagacgagtagcagtgctggacctacgaccaagctcacgggtacattcactttggctttgaatgggatgaagacagcgacgttgccgtggaatgcgggactccaggtggttgaggccgcactggaagccctgagtgctctcagtggattcgttacagtcgacacgcccgacgtgctaacgccggtggcgacgggaactgtcatagccacaaagacgtccaatgtcctgacgacctcgacgagcttcctaacgctccccgatttcgtagtgggcgactggattcgcgtcggatctactagcggacctgtcttctctatcaccgcgatcacagcgaccagtatcacgctctccggaatttaccaaggcgcctcgaacaacgcggcgactgtatacaagcaaagcaacgcgggcgccggctacacgtaccggattcagtttgcggccgagcttggcgacttgccagcgctcgtcgcggacacttcgcagctaagcggtagcgccaaggtcacagcgtgcgattaccttcgaacgcagcagctccagagcactgcagcgtcgcagatcagtggcacgttctcgctttcgttccgtgacagcgtgacgccgatgctgccttggaacgtcggcgcgggtgcactgaaaaatgctctagaagctttggacggaatcctcacagcgagtgtgagtactccggtatcaggactgaacggtggatacagctggcagatcactctcgtgtcgacggaagcccaagatggcaaggatctcgacttgctctacgcggaaggctatctgctcgtcggggaccaggtgcgcatccaagtcacgccgacatgcccgagtacaacgacaagagaagccgtgaaggttcaatctgtcggcggacgcgaaggccactcgtttgtcccggtgctgcgtggcgcctctactgtggtggccgatgtcagttatctgggcggcgcgacgtaccaggctatctacgacactccgcgagaggcgacctattccctcgacgttcggtacgtcgcgcctcgagggctattgggcagctacttcgacaaccgctggttgtacggcacgccgacgctggagcgcgtggattcccagatcgatttcgcgtggcaggaagaccggatcaccccgacgagccgagagcacgtgagtgtgcgatggcagggctacatcaagccttcgttcagcgaggactacacctttttcgttcaagtgaacgacggcgcgcggctctggatcgagaaccagcttgtgatcgatcagtacgactatgacgtcgagtcttcgactgcggtggagttcccagccaacacatcggtgagcttggtgaaggatcgactgacggaggtgacgctggagtatcgagagaacgcgggcgtggcctccatctccctcttgtggcagtctcacacgcagcccaagggcattgtgccaagtgcccgactgttccatcggtcggatgcgatcatgcagagtccgttcaccgtcacgacacacggatccaaaccgtcaccgcctaccaacatcagtctaacgattagcgccgtcaacgcgcttacagttcacttctacgccccagacgatgacggcggcgcgcctgttactaagtaccaagtcgaatggtggacgtatggagcgtacggctcaccggaggtgcaagtcgtgaagatcgcaacaaccaacacgggaggcacgttcacgctcacgcttgggactcaaaccacgggcccactacctcttaacgctctgtatactgacgtggaggcggcgctccaggcactcgatggagcaggggatgtgacggtgacttcaactctcaacgcgaactctcgagactacaccatcgccttttactcgattgttggaactgttccgagcatcacggtcggcgtctctcagctcgtgggcacgaaagcgtacatggtgtgctccaaaggagcggttcaggccctggctaacggcgtgcagtgtaccgcaggcgagagcaccacgagttctgtaagtctattcagcacgcctgctcagttctcgcctcctgatgtaccgaagcgtggcgatccgtatgagtttctcataacggggcttacccagactgcggcgactactgcaccgaacgcggctggcgacgtgggcggcacgaatggcccgggcttctctgtaagagtgttggctcagaactctgcgggttttgggcttccgagcgcaacggcttcgttaaagccgatggctgttcctgcagctccgctgaacgtcgagttgcggctggttgcggggttgtctaccagtctgcgattgtggtgggatgccccagtgaccaataacgcggctatcatcacattctacgtcgtagagtggcggcgactggatcaaccgggcagtacatcgaattcggctgctttcagtagcttccgtgaaaccccggcgttcttcctcgcagcacacccgacctctctgaggtacaagtacacagtcgacagtcttgtacctggcgccgcctatgttgtgcaagttcgagcggaaaatatcatgggcgttgggcccatcggacagccggtgccatccttcgaggtgccacgcagtaaggcagctccgttacctgcgggatctggcgtcgctttgagtgtgcgacccgcgtcttcggccctaccaacatcggcgtcatgcaccagcctgcttctgtcatgggtcagtgtcgctcaagcggacacccacggcgccgccgtgacgagctacgtggtcgactggttccagccgcaaagccccgacacgtcgccgttcgaggtccaaatactgcagatcttcggcaaggacgcagcggacgtggtcaagggcacgttccgagtccagtacaacggggtttacaccgagccgcttcctgttgatgtgagcgaggcagagctggaagacagtctggaaggtttaccagctctgcgcagtgtggaggtagagcggacatctttcgcatcgcgcggagggtatcagtgggctgtgacgttcctgtccgaagccccagccgtgtcggggatgacgctgacacttgattcgaccaagctctcagcaacgattctcactacagatgtaggagcgcagctatctacggcagtcggcgctagtgccgtcacggtgacagcggtgcagggatcggctcaggtgacgagcacgaacgccgcagctacgagtgcagtcgtggacatgtacgtctccatctctcagcctggtgtcgtcgtcggattctggcgggtgattgcagtgtcggtcaccgcgggtacagcaacattgacgctgtctgccaacttccccggtgcgggtgggaactaccccgcgcagctcgggtggactgtcccgggagtggtaccaggaggctatcactcgaaggtcgtgccagccactgctttgaatgccacagacctgacgtattcgctggtgctcgacgcgttgccccccgggacggcgtactcggcgcgcgtgagcgcgtgcaactcgatcggatgcaatgctccaacaatggcgacgccgttgacgctggccccgccgaagcagaagcccgcgcagcctcgcgacgtcgcgctctttgccgatagtgcgtctactcttcgagtccggtggcgacacccgtcgagcgatggaggagacgtgatcacgcactaccgtattgaatgggacccacagcctacgttcgactcgggagacgacgcaactggagaaacctcttggggaagctcgctcggctatgagcggaagccggtggtaaaccctggcgttgactgtctgctgactccgtgtgaagccgtcatcgggacgcttgagcgcggtacgccgtactacgtccgcgtctacgcctacaactcgtttggctactcgcgggaggcggcttatcctgtcatgccaggcttcggggtgcccacgacccttcctgaccctccagtcgaagtgttagtgctgccttccatggatcgaggactcgtcgtgtctttcaacacctcaagcgacagcttcgacgacggcggcgccgacgtcacgcaataccagattgaatgggacgcgatggacatcgatgcagtggtcccgggaatgctggacggcgtctcgaaagggtggacggccgccgtgatctcgactaatgtgatcaaccaagtgctatttgctgagtacacgacgcaactgctgctactatctgcgactgcctacgacgtcctcggatctttccgcttagccttcctggactctgtcacgcctagcttgccgtgggatatctcggctggcgctttgaccgatgcactggaggcgctgccgactgtaggccaagtgaacgtgcgtcgggtcgctgctggcttcggcttcgcgtggttcgtgacgttcctgacggcgcctttcagggctgatacttccattggaggcggagtctttggtagcgttcctctgctccaagtctcagttgacagcagccagctcctgtcacagttcagtgcgtctcaaacggcgactgcatccacgtcgttgacaggaacaggagccaccctcgcgtccgcgactgtcatccaggcgttcaacggcttcgagcaacaagtggtgaaggtgttcacgactgcagggacactaggcggcttcttccgacttgagtacgaccaccaacagactggccctctaccagccaatgccaccgccacaacggtcaagcaggccctggtgcagatcaatgacgaggacgacttggtcggagacattgacgtgtacaagcgtcaaagcgccacacccgtggggtttgtctacacgatcgtgtacaagtcgcgtctgggctcaaacctgccgccggtgacctgtatcggtaccgacctcacgagctccgtcacgaccgcgacgacgtcgtgcacgaacacgcgcgctcatggcggcggtcttcctgctatgaacagcgacttgtacggcgttgcggtcgtaaacacgactgacctgactattgatggcgacggaatgacgcactacgacgtgctggacctgcagcctggtatcggctaccacgtgcgtgtttcagcgtggaatggagtgggtaacgtgttcggtgagactcgagcttcgacgccagctcggtacgtggttcaaatccccccgaacgtgcctcgaaatgtgaacgttgagccccggtctcccagcgcgttgctggtatcgtggacccagccgctcagcacaggagggtctccaatctcgagctacaccgttcagtttgctgcgcgccgaggtatagcggagcagcaactcatcaaggccgacagctctctgggcgatttatcgcagcggcgactgcagttgacacttcgaattggggacaaaacgggatcagcttcggtgcgtggcaacgcttcaagcgacgacctgcgcaacgccctctcttctgcactgagcgcccccggagtgatcgctggtgtgagtcgtaacagcgtcggcatcttcgatggatatggctacgagtgggtcgtcacctttagcgactcaatcggcgacgtacctctcattacgattgttgagcagcagtatgacagctcgaatcggtctcctgagtttgtgtcggctgtagctctgagcgtgaccgagttggtgcaaggcagtgtcgacggcagcagcatgacgtcggacgctatcactactgtggtggttgtgccgcagcatgaggtccagcgtgttttcatctacaccggatcacctgttgatctaggcggatcggtgatgctgagagttggtggcgagtcgactccagcgattgcggtcgacgctacagcagacgatgtgcgcgttgcgctggaggggctgtcgacagtcggtgaggtgcttgtgacggtgacaggggagattatcgagcgatcgacctatccggcaatgcggtacggagtgtattgggacgtgacgttcgtcagcttagcggaagatttgcctctgctggccgtgagaaccgactcgactcttccgttcactcccagtgcgtgtggtggatcgttgtcaggcatcacgccatgtgtggaggtggtagagctcgtgcagggcgggctgcccacgcaaaccatactgagtggacttagcaataccacgaactatatcgtgcgcattgcagcgtctaacgagaagttcaccagcccatttgtgactgcgcctggagctgtgcagccggctgcgaggactccattggaggtccaaagtgctctggtagcgcctctatccgccacgacgctcggtgcttcctggaaggcgcccctcttcaatggggaagcgcgtgtggtgcactacaaggttcaatgggacgtgagtgcgagtttcgacctccagagtatcttcgcgggctcggatgtcgtactggcggacgatggagacacgtcttttgactatacgatcacggggctaagctcaaccatggactattttgtgtctgttgtggcttacaacgcgcgcggctacggtgttccagtgacagcggcgccagtggatgtccacgaacgcgtcacacacatcacagtacagggaacttccctggtcgagtcgactttggctaccgagactttcacgctcgcctttgccaattatcctaccaaggcaaccacgtccatcgcggtgatcgcaagtgcgctggagatgcagcgcgcgttgcagcgccttgccgttgttggagtgctgtcggtgaagcggtcggactattcaaagggccctacggccacaccatacgacgacagtggggtgaacacgcagaacaactttgtgctggtgtggagtatcacattccgatcggcgtcgatcgatggagtgcgcgccagtcaactgggtgcgctgacagcgacacacactggaccaagcacactcactattgcagatgtggtgacgcccattgaagatggttcattgtcgattcgcccgcggtttgtgtcggctacgggcccgcgagacgtacgcgtttcaatagttcaggctgcgtcacttggtgtgagttggctgccgtcttcggcgccttcgactacgaagtatctcgtggaatggagctcagcgcctgatttcgcgtcatgccgtgcagggtccattagcagtggcggtacgaggacggactacgccaccgctgcagcgaactcgcaggtcgtagctgcttcctctatcggcgcggacggccgaatagcgtatacgattggaagcttgcctgctaataccaagcagtacgtccgcgtatcggcttacaacggcaactacggttccccgatactcggacaaatcttgacggtgagtacgcctgcaacgccggaggatgcggcagtggtgtctgtagcagcaggcgttaagagcgtgagcccacgggcgctacctccataccgaccgacgtccgtgacgatgcaagtgagctctgtcgatcagccgacgctgctcgaagtgaactttgtccagccgacgaaggacgcgttggggttcacggcagacaacggtggcgctgcgatcacgcactaccgtctgagttggtgggaggcctcggcgagtccgaatgctcagtcggtgacttcctacgacgtgcggatggtggacccaactggaggtccgctgacgtgctcgtcggcagcgtgtatgttccggctaggagctgaagtgcagtcgctgtcgttgactaccccgtcgactgggtccttccggttggtgctatcaaactcggcgttcacgcagtcggtttgtgctggatgttcgctgtccttcgctttcccagccggaaacagcggcaccatcgactacaccggttcggctacgaatttgcagtcggtgctgggcacgaacacccgcttcatggtggacaagcccaatgctggctgcgtgttcgaagtagcggcagcaagtacgctgccgaccaacaagctgccggtgtggttcgtgtctgctgcaaatggcgcaaccacttgtcctctgggaacgggttcgtactcggttcatgtcgagccgatgacagcgtgcattccagctacgacgaacgcggcagcgttggcctctgcggtatcggtcttggtgaataatgatggtgtcgccgtctccctcgacgtcgaagctggcagcatcaaccacttccgtattaccttcaccggctcgagcgctaccggagcgtcaggtagctccgctgctcacgtagctgacgtcgctcagctcgaagtcgtcgcgacagatgccactggagggtgcgcggatgtttcaggcaacgtttggacgagcacagagctgaacgggggcatgctcaagcccggcgtgccatacgcagtgcaggttgcagcacttaactctgtgggccttggggctccacttcgtgccactgcgttgtgccacgacgtaccgtgcgctgctggcactgcggctctagctcctgcagcaccaccgcttgcacccatcgccgtgacggtggcgagcgatcgcgccgatcgtacggcgctgaatgttgtctggaaagccccgacttcttccaatggagctcctatcacgcagtatcttgtggagtactcaactgcagcatttggatcgcaaccgttgctgtgctcgggctgcgtgacggcgctcacagctggaacagccacgctgccaccgacactcacgctcaactcgaacactgttgttttgacgagcggacaattggtggtgctcagcagtgtgtccccttcgtgcatcctcacagtgagtacggatccaacgacgttcatcaacacggcgtggactggaagtcgaatggtttacaacctggagagacgtcatggctgcgacgctttctccgcccaggccgttaacctgaaggcgttgtatgactccacttcggacggatctgtcgtggtcttaccaagcgctgacggaagcgatccgcagacgacgaagctcaggtctctgactgcaaatactcagtacaccgttcgcgttcgagcccagaaccgtgaaggctacggcgcgactcaaatcgctactttcatctgcgaatcgggtatcgaggcttgtaaagccgcggggacggtggcagtcacgcgacaactgcctgtggctccgacgctcacagtgccgactcaactgctgggggcaggtgtcgttggagcgacctccaacgcgttggggttcacgaaagacacgctgactgtggcgttcagcgacccgaacggctggtcgggcctggagattgtcgactggttccgggtcgaatgggacgcacgcgcggacttcttgtcgtcgagcaaacagatcgcaatcgtgacgccgtcagccactaagactccttcactctggttaacccgtcaactttgctcgagctgcatcactgacctagtgactgcgacgaacgtcctctctgtcagaggaggcgtggggcttacactgggtctcgctgcggatgactgggtcatggtcggcgctggatcaatctcttgccagttccagatcgcgtccacggcgcctacagcatcgacaatcacggttgcagcgggccacgggtgtgcggacttcactggtaaaacgctggcactcgccgcgcaggagacgtacgtccaccgactcactacaggtctcacaatgggagtcacgacgcacgtgagggtgacagcgcacaactctctgggctacggccaaccgagtgacagcgtcgcgctcgctccaatcacttcaagcgacccgccgccatatcccagtgtcatcttgtccgctttaactcgcgcggatgaggacgacccagacacgcgcgtaagcgcactccgagtgcggttccctcctccgacgatatctctcccgaccgatgtgaacggcgacggcgggtcgcctgtgacacggtatctcgtcgagtggatcgacacgaccgagttcgccaacacagtccctcagatccaaacggtcagcacggcgtcggactcgagcggcagtgtggcaggctcgttccgactcacgctggacacgacaacctgcttgaactgccagatccaaggcgcattcagcacctcggccttgagcgcgtcgatttccgacaccgacatggcgcaagagctccgcaacctgcctaacgtcggtgacgtggccgtcacgcgcgacaactgcgcgaccaagaaccagtgcacgtggtcgatcacgttcttgagcgaattgggcgctgtgccggcgttgacgtacacgagtcggctttacgccgcgggtgggaaggtgacagtcactgtgacggcaggaactccggtcccgagtctgtctggagcgacgtactgccctacgacaacggggagcggcaggacgttctgtgggaagatcaacaacgtcgatgcgaccacgccggtcccgtacgagtatgttatcaaggggctcgctcctggtacgacgtactacgttcgagtagcagcctacaacgcgctggggtacggatctcggcgagttacggctccaacagcatttactgtgccttacgaatctcctacacccccaagatcccccttcaacgttgcggctgctcccattctaacccttgctgggcctacgtctctcctcgtgagctacgctcctcctgaattcgatggaggggctcaagtcacggggtatgtcatcgagtgggatctgtctccagagttcgacagcggagcgaacggtgacgcgctcggacaagtgacaatagctgctggtccgttggaggcggcaagcgatggagccttccgctataccatcagcggattggtcacgggtcagtggacctacgttcgcctgtttgcgttgaatggcaaggtcggcactggtgagccagtgctgacccagcctgcgcgcgaaatgccacgccggaagcccgctgccccgagtgcaatcaccgctgccaacgaccctgccgctcaacctccgggcacggcgctgttggtctcctggccggaagcggctgtcgatgtctttgagtaccacgtggaatggtaccagcaagcggtaacagagccgctgttcggagcaccggtggtccagactgtgtcaactacaggttcgatcactgcagggttcttctccttgtcgtttggcgacggcagcgacttgtatccatggaggcttctgcctggcactgtgagcgtggagcatggcgctgcatacctcaagacaagtgaagacctgaccggacttcttgtagcaggcgacgtggtgtatctcaacagccaagcttacttggtgtcggcgacaggaacctttactgcgtctcagctgcctctagccgacgcaacgggattccaaagcgttgggatattagcgagtgcgctcggttcgaccgcggcaacgtacgcaggagacacggtgacgggagtgcagctatatacccaatggcgcacgacgccgttgccgatggacgtcactccgtccagtatgcaggaggcgctggagctgctgccgagcgtcgggttggtccgcgtcgagcgcatgtcgactggcactgccaacaactacgtgtggaccatcaccttcacttcgcaggtgccacgatcaagtcccgccttcccgttgctcgtggcaaacgaccggctactcaccagtacgaatgctgatgccaatgctgctgtcgcgagtatctccgctggccaggctcccgtggctttcggctctgcggttgtgaatgtaaccgatacgtcagtcgacgacggcctcctcaagtacagcatccggcgcctcgacaccgggacgatctactttgtccgcgtagctgctgtgaacgaacgcggggtgggcgccttcacctcagcgtccgcgttaggtgtcgcgcccacgaggtctccgctcgcgctgaataatgccgtggtcggcgcattatcccctcagctactggatctgtcgtttgaccaggtggacacttcaggcggactaggagtggacggataccgcgtcgaagcagcactcagccctaagtttgcagactcctctatggtcgtccaggatttaccaccgaccacgaagtacgcgcgcgtgacgactgcagcccatactggcccgttcacggctgggagcacgttcacactcgcggctgtggacgccaagtccttccacggctccatggtcaaccaaatcgacgcgttggcatccgcacaagcgcttgaggctggcgccgccttcctcgtgcgactcaagccagacagtacgcagggctacggagctgaccagctgcattggaagttttctcgtggagagctggtgcggatccgcaacgagagagcgagcgtgtgtctcgacggtagcgtggcttggcaactgcgagacacgacgacggggctcaatagcgttgcgtatgatcccaccaccccgaccatcacgctgtctacggcgcttactgggaacctgctcacggcaattgtcgcgggcacgcagatctcggttggagccgctgctaacggaccctcgcaccctgccgcctgccacgcagtggtgaccaaagtgcacgcagacaagctgaatctggacatcgcgcactcatgcctcaatccaggcaccaagctaggcagcagactcgcagtcttcgtggtcaagggggtggcggctatcaccagcactgcattcgatgccaataccaacaccatcacgctgtctgcaccgcttgccaaccgcctggttgatgtggtcgtcacagacacccaaatctcggtcggcagcacgccggaagacgctggttcctgccgtgccaaggtgaacgcagcgacgactacgacgctgcagctgatgacccccctctgcgccgaagcggcagccaagctcaatgctggtaaacccatttacctgcaccgcggaccagcgctgcttccgctatgcgagcccaatgatccttggactccgctcagcgcgtcaagcatcgcagctttggtcgctaggctggatgcatctggaggtcgcgagcctttgccgctcttccgcagtgattcggctgtgagtgtcgcgacggagcttggcaccgttgggaacagcgcagaggtgacgctcgtgactccgatgactattagctgtggagactacgtccgactaggccgcgtctcgagcgctgatggagttggcgatgaagagctcgaggcgctcgctaccttccgcgtgcgaggcaagtgtggttccagcagttgtgactgtgtgcgggcttctgctacttcgcggttgcagctcggaagtcttgctgaccctaccatcgctgtcagcctatctccgagactagatctactgcacggaggcgctacccgcgagatccagcgcattgtattgaccgtgacgggggctactgtcgcgtacaacgtcggcggcttccgcatccaattcggggacgaagtgagctcgctgacgcttggtacaggcggggacggcggagcttcgctcaacgacgacgtcggctgcctcgtgtgggcgtcaggtccgttgtcaagcgatgcctctcgggacatgctgacgctcgagcgtgagctcgagaactttgctgcaatcgatgacgtccgcgtcaagcagacgcttaccgtgactgctggcgtccgagtgactgtcgagtacacggtggagttcatgggcgtgcaagtgcgcggcaagatgcccagacttcagattctggacgtgggtacgaacggctgcagcgcgttcgtcggcggtacggctaatgctcagcccgtgacgcgggaccaggacagctttgtgactgtgtaccaggcgcccacaacacctccaatcccattcgacgccagcgacgaagacgtcaaagctgcgctcgagacgttgagcgttgtgagcaatgcggacgtggatcggcaggtgaacaaacacggctacgactggcgcgtgacgttcgtggagttcccagcgccttcgaggcagatggaagcaagcgtcttccctgcgttggcagtgaatggctacgcgttgcaggctgtgcagtcgccgcaggtcagcgtcactcccttccagcgtatcgagcttgacacgaagtcactcgcgagtggaggtggagtgtcgatctacacgcgcgtgcgcgcccataacgctattggatggggagttgcgtcgatccctacgcccgcatcgcttcagctagcggaacagccgccggaccctgtgcgacttgctcgagcggacgtgttatcagcgtcgcaggtgcttgtgcaatgggacgcccccgctcacgacggcggagaaccggtgaccgagttccgcgtcgagtggtggctgcacactgcgagcccaaccgctgccaagacgtttgctgtggttcatgcgcttgaagcggcttcacaaagcgtgacggatgatgttgctaccattaccgtatctgctccgacagtggggacgaatacgtacctgtctggcacattccgagtgggtttcgacggccagtggagtgacgagctgccgtacgacgtatcaactgtggacatgcgcacggcaatcgctgcgttgccaacgattgaggacgttcttgtgagccgcgagttgacggcagggggctacacttggctcgtgaccttcttgcagcggagatacggcggcaaccagcacaagcgatggcgatcagctctcgctacgcagtctcccttcggctacaagctcgaggttttgggaacaaatctgctagcctgcacgagcgcagagctgactacgtgcgtgccgcacctctcgaccaccatcgcagcgcgtgctgctgtggactccatcccggagttccagtcgctggtgtgtatctcgaccggcaacgcggcagtcacagctgccatgacgttcaagcttcagctgctgggagctcaaaccacggttatcccgggcacagcggacgctaacgcgctagcaagcgcgatcacggcgctcggtgttgtgggaaaagttaacgtccgcttccgagactcaactcaagctacagtgtgctccgccagtgcgaccgcaaagggtgttaccatcgagttcatcacagctcagggagacatttccccgatcactgtggtggcccccaccggcgttggagtcacgatcaaggagcaacgcaagggtcgagctcagctacacgtgggtcggctaccattcgcctacgtgatcgacggtctctctgctgggacgtatcacgcgcgagtcgctgcgtacaacagcgtcggcttcggcccgttccaggaagccacagactcgagcgggttgctgttagtgtcacgtcctcccttggcgccgcggtccctccgcgtgaaggcaaagatgattgattactcgcatggcatgctggtggtttggactgcgccacgcagcgctgacggcaacacgaaccagtaccgagttgaatgggactttggtgctgggttttcgagtcaatgtggagagaacgtcgagacgcagacggtggtggtgagcaatgcggctgcgaatgctgccaacaacaagttcgctctgctgacggacagtgctgcgaacggaggggctgcggtgggttgcgtagccccgacgagcctgacaagtacgctgctgactccgcttcaagcgctcggtggagcgtacactggcgcaaccgttgcggtgcaaggcgacgactcagccacgtacgattacggccgaacgttcaccatgacgttccctcaaacggtgacgaccccggctgtaggctacgacgttgtcgagaaccaagctgtggcgacgtctccggtcggtatccccttgttgtactggaacgctggcgaccaaagctgcacggccactcctcccgattcagtagtggtccagcgcgcaacctacggaccgggactggatgggaagcgtggtcagggacgtattggagtcgacgccaacggattggtgaccagcaacgagtgcgcggccgcgttggcagctccaatcgcgagacaaacgctgagcgcctcgactgcattggccaacgcgctcagccccagcatcctgaatctggcggccatgagcggcgtgttcgagagctccgacctcgcaagaccggcgttgtgcgagtcgtgcgcgcagaagctgacagtcagcggagtgttgacagccacgatgccgctgtcatcggtattgagcaggggagactacttcgttgtcgccgactcccccacgacaagcaccacgacctcgacacttcgctgcgtcatgaaggttgcgaatatcgtggacggagcgtcgagcagcacgatcgacgtagacgccaacgaccctggtcgtggcgcgtgcttgcttcctgcgacctatgaggccaaggcctggcgtatctccaagtttgagctccgagcgcacacgatccacgacctggtaccaggacgagagtacgccgtgcgggtcgtcgctagcagcagcactttgggagaaggccccgcacttgccacagccaccacggtcaccgcagcatagaaggtgattgatttccctggtggttgtttttacgaagtatttgttctagtgttgtgtatttgcatatttctcacagtagtatacgattctttattacttcagctgctttccactacaccgccttctccaaagcagaacagtaattctatctcttaatgaggataaccgagcaaccaagcgtggatcaaaagtgtttgctcctttcgaagtattacgtgcattatcggtctctaactcttgcaaataagtattgcttaggtattcacttcctcgtcatcaagaacttcgtgctcgtcagcgagcaacggcacgtctgcgttgctcaaaaatcgatcatcgattgtgtcgcggcaacaacggcaatcgatatactcggccccttctgaaggtgcgccagtatgatgaactctgcaataacgatcctcgacggcattctcatgctccattccccgtcgccgggcgaagagcagtgacgcatttatagggacgacgtaatccgcgactagctcgcgaacgtgtggcacctcaaactggatctggacctcacctacatcgaattccggagcagaaggtgctccactatcttgcttggaagtagcatcgctcctggtttcaccactgcaatggtggacagcgattggagtctggtgcagcattcgcagcacaatggcaacgttcgcgacctcccagccgaagtggtgcattacaacagttcgccaagaagtcacgtccaccgcctccatctcactctgtgaagcagcaaaggcacataatactccgcgaacaatcatcagttcggccaagagtgtgctgcacatggctacactcttcagacacgaaatgctcaacaccggcagtctggaagagctcttctgtgacgattcttcaccatccaacgcactccattgatgccgacgtcgatatctccacagaaatttgactgcctgtccccagtacttcagcatcagcagtcccaacgtcgtccagatcaccgccgtgtagccaaaagtcaaccactggggcaccattaacccccgagcatctcgctctgcccttccaacagccacaagagtcaccaacgccacaagtgacatgcagtaagccacaaatacagcagagaggattccattatcgccgcttgatgtggctccgggccaccgtcgtcggaacaccagacgcactgcgaacagcacaatgtagccatttagcgccgccacagcgacactgggcatgtcgagcagccagaatgtagccaccttaaccgggatctccattttctccacgtcctccattgcagttagtgcgaaaaacgccgcgcggagcagcagaagtagccatgttgctccgtacagtgggcggtggaatcctcgacccagattgaagctccgaggctgcagacgcgcgcgccgctcgagcgcgcgcactgcgagcagcccccgtcctatggggacgcagagctgaaggcagagcgccccacagcccagttgccagagcatcaggagcgaagcgaagaggggcgtcgaggggacgcggcgatgaagtgaagagcacttttcgaggaatcgcgattgatacctttgctcccatgaaaatgacttggcgtttgtatctacaccagctgttcactaagttgtattttcgccaatggtggtacagaatgatcgggaccacttcaacttgccgttcatttacagttaaagagtgtatcgagcatcgagaacactcgatgctgccgttggaattggccagaagcagtgttggagctcgtgtctcgtgttaccggggcgacggggctcagaatccccaagctttggcctcctctgttgactccgcccagactcattctccaattgaccaagtcgagagcaaccgagcaagcgagaaccaaccaagactgagagcgagatgttttcttcgtgggatctggtgcgcccgacgctgtggcaccccatgtcgatgctggagctgtcaatgatggacaccaacacactgccgcagctgtcgatgagcatgcgcaacgtgcccggcgtgagctcggacgaagagtttttcaaggacctccccacgacggaccagcagcagcagcagaagaagaagaaggaggaaaaggcggcggcggaggaggagaaccaacgcgccttctcgtcctactcgttcagcagctcgtcggttgtggacgaggaaggccgcaaggtcatgagtacgcgccgccgctacgaggactcgaccgggcgactgaaggcagagcacgagcgggaggtgctcggcaagcgtctaaagaccatctggaaccgcaagaacgcgcaggacgatggcgaacaccacacgatctgctcgcagggcacgcccgacgagtttgagaagctctggagccagacggcgttcggcaaggcccatgagaagaagagcaaggagctcaagcagtcgggcgaagccgagcagcagccgcagcacaagcaggtggagagcgcgcccacgagcaagtctgcctgagttgactatcaacagtcccagtggcggcaagcccaaggatgtgcgtgcgacttttcctattgagttttgagtcgactgcagcctagtaatggttcggagaattcggtagtggagataccttcacgtagctgtagtcgcgccaactaaacatgccagtaaaaacaaatacttctaatgagtgttgccattgcatttaacgttacttgaggatgtccttgacaacaccctccagaagcttcttgatgcttggcatggcgattttcatcttgagcttgaagagtttgtccttcaccttggtcaccgccgtcagcatcgcgcgttcctccgttagcgctagctccttgttctgcgtcgacgcgtgacctttgtgaactcgcagaaacctctgctctccgacggcggggcctgccacgttcagcgagtcgatggagttcttgacctcgacagcattggtgctagcaaggagagtgacgatagtcgcgagaacgacactggaaagccgcattgtggtccgaatcggcgaattgaggagtgagggagatcggcggcgggcggagtcttttgtctcgacaacttcgttggatgcagatggcgcgagagccgtttctgctgcagacttgctgacttggccagacaggtaccgtaaacgctcaagagcatttcaggatctgttgacatgtgagcaaatcgttacttcgtagtgcagttactgccctgccctgcagtaactgcactacgaaataacgattgccctgcagtaacctaatcagaagtagaaaccttacctgtacctccgtaacctcaacccaccttcagacctcccaacttccccgactctcggcctaacctgcgtaactatcatgctttgcataaatagcccatctttaaaggtgccgcgtactgcgtacagtacgcggcgttcatgcaggctcgcagacctcgctcggacgtctaatccagaactggtcaccaggagcgatctctacagccgaatttgcgcgatgaacgagcaccgcccccctgacgaagtgctgaatagcgcctcgcacacgccgatggcgtctgtccctcaaaatcgcagtccacacactatcgcccgtgagagttggaacgctacaggatgtgattttcgctgagctgtttctaccaacacgcgccaaacaaagagaagccgaaggttagacaccgtgttctcttccgattcggatgccgccagtgagtcgcaggttcaagaggtccagcagcgctcggtacccagggttgacgcaacgcctgcgcaacaagcttcggacggcggtgatagaggtactttggtcgccatgacgcctgcgcaacgagcggtggacgtcggtgctagcggtaattcgactgctacgacgctaacagctcctccaccactatggcagaccccagtctacgaaacggtaatggcagtaccgtctcacaaacaggttggcatgagtaaattaaaattcgaaagcctgaacactggcagtttattgtgcttgtggctcactaccggttctggaatatcgatgataaaaacctgaagaacgagcacactgcgtatgcatattgcacaaggtgcaaacgatcggttcgattcggcaagggaaacagcggtgttgagaggcacatgagcaactaccacgcagcagcgctcgcaaattacggcaaagaggacgatgtggatgagaatagccttgagccgcagcccgaagttcaatcccgacagcttcgtgaagttagccccgagcagcagaaggaggtgtacgtgcttcttgcgcgttggatagcagcccatttttgcccgcttctcttggttgaagacaaaggctttattacgttcatcaagttcatcacgagcgcgtcggtgagcatctcgacgtccacgagcgcttccgcgtccttcagcacgtccacgtccttgaccatctcgatgtccacgagcgcgttggcgtccacgagcgtgtcgccttctcgagcacttcggcgtccacgagcgcttccgcgtccgtcagcaggtcgacgtccttgagcatcgcgacgtcctcgagcagatcggctttctacagcgagtcggcagctacgagcgcgtcggcgttcacgtgcacgtcgacgtcctggtgttcacgggtgttggtgtccaggcgtttgtgtgttcgtgtaagctcatataatttttatatggagttttgtatgtgggaggttagcgaggttagtgaggtgagaccaaccttaccttaacccgcgggaggttgaaggtgaggaaggtaaggttgacaggactaaccagaagcaagaccaccaaggtacgtagaattgttcggtgttggcatcacacaaaaatctgcaagttcgcaaatacaggaataagtattcagactgcattccgaatacagagcaacatgtaaatccgccgtatcagctctcttcgcaggtaacttagtcactctctgctttcctcccaaacgcaaggccaaacgcttggcgatccatcgagattgtgcagaaagcgtttgccatgatgagacagattacatggaagtgcaagaaaagatgatgttctgtgaagtgtcgatgatgctcatgtcggtgccggtccagtacccacaacctggtgttaacgagaatttgttcgttctcggacagcacagttctcgaaaagtatggcagtgcatgtgcattgagtacattgttaaacaaacgtttcgtgttgtacgtgccttcatggtcacgtcgccgcacgcaggaaagggtacgacggcagcagataccgactcatttcgtgagccgatagagcctttagatcgggtgcaatgcgcgcgagcgaggcacaggacggccgcttctgcaggattggacagtgctccatagcctgccgcacaatgcgcgagtacacgaacagctgcgcttcgtcggagtgctgcagtactgtcacacactggtgcattgaggttgcacccgtggtttccgcttggcaacacggcacagtatgtccgacaaagcggcaaaggagtccgccctcttcattcacccgctcctcgcgtcgatttcgagtgagatcgaagtggaaaaggtgccgggataagccgaactgctgcgccagatccactgcaaaaccccatgtagctagcatcaacatcgtgtacggcttggtggcgacgcccgttggtacgagtagcttctcctctggtgagatcatcgtcatcagtcggccttgcatcgtcccgagggtgaaacgcaacgctttcgagtcgttgaggaacgcccccaacgcggccacctgcacgtcgtacaacaacgcgaagagcccaggcgaccagcgaaatgtatcgcgcgcgtactcggagtggagactgtcgaagaggtctcgagtccattgcacgacttggtcactcaagtcaccgtggagtaccccgtcttccgaggtgttggagctcgtggtattgagcaatcgaatagcatccagcagcatagggactaccgctgtgtgtcgaatgcccatgagggaccctcgcgtcttgccgtcagtgctcgtaagcaacttctggtacgacgtgtctgcgtattcgagcgttgcccgcatggcactcgttggattggcgcaccacgcttctaagaaccttgatgccttaagagcgtactgcttgtcacccgttattcgccacgctaaggacagcgcagtggtgttgtacgccatctctcgaattaaatcgccgtcattcagcggcccatccttatgatcgaagtagttcgcgaaaacccgggggtcacgctctgaatccagggactcgttactggtcaccgtccaggactccgatacctccatggcacgattggcgtcgtccaaaagactagaaatggcttgcttgccttcctcggtactggattgctgtgtgtaattttttagaagagcttcgtcgtaaacgagaagattgtccgggctatagtggaagagctcgagcatcacgcgctcctccagcttatccagcgcgttgatcacgccctttgcccggcgtatttcacggccgtatcctgcctcggcagtgttcgcctccatatctgactccaggccagaatacaagcggatcacgtacccggtactgggtactgcatcaattccggtaacgtccctggatagattggcaaaagtgcgctgctgttcccacgagctccacccccagccgttccacacaccactcacctgcagtctgataagcagagccgccttgtcccgctgtccatagcgaagctgttcgtcaaagcgctcgacgctgtcgttccggaagataatctgcggttcctcccacggatcaaccttgaaaccaggcgagaagatgacgtcgttctcctccgtcagccgatccatgaacgacatgaagtacttttgatcgggtgccgcgttgtcgagatctcgtttgatctgcccccacgcctcctgggtcaggaagcatgtctgatcccatggcagcagccacctcgctccgctctgtctagcaatgtccagcatcacattgcgcgcgacgttgatgcccagcgcgtaccggttcttgctggcgtagatggcgttgatgtcctggtgcttcgtccactcgtcgtcgtccctcgggtcctcgtgcacgcggtccactccgtggtcctccactaccacattgaacggagcctgcgcgtactgctccagccgcagcggcagctccgtgtacggcgcgtcgaactccgcgagcagttcgcggaactgccgcgccacgtggtcatccgccaggcggttgagcacccagtgggtcgcgacgtccagcttctcgtgctccaggatgaagcgcaggttctgcagcgcccgcgaggggtcgtggcgcggcggcagcgcgttgccgatggcgcgcaccagcatgtacgtggggggagtcgctcgcggaggccgcggactgcgcagcaacggccgcagcggggcctgccccagcgacgacatgcggtacgacagcagccccacggacagcacgcccagcgccagcagcagtgccagccaccggcgcacgctgcacgcgccacgctccgccgccaacatccccgacgccgccgccgccttgaaccgcggcatggaagtttgcaataatacttattttaatattaaaatatggctaacgtggctatgtcgtatgatgggccactggaacctagccctactaagattcgacgtatgtgattcgtcgaaaaagatgtagtattatgtgcggcaccttaaagataccgacgagatactatcttttcgatacgatctcttgctcgtcactacacagtacgatgtggcagcattcctgcattcgccgcgtcgcgcgcagagctcgagttccaagctccccctccgctgctacatcgccatgagcgccaagaagtcggtgattgagctgcgccacccgtcgggctcgcgcgccgaggtgcagctgtacggcgcgaccgtcacgggcttctacgcggcgcaggagcccgagcgcaacgtgctgttcctgtcgcgccaggcgctgctggacggcagcaagcccatccgcggcggcatcccgctggtcttccccgtgttcggcgccgccgagggcttcccgaaccacggcttcgcgcgcgtgaaccactggaagctgagccagctggaccagacggtgggcgacgaccagagccccacggtcgccaccttcgcgctggacgtgacggaggacatgaaggccatgtacccgcacgacgtggcgctcgtgtacgaggtcaagctgttcgccaacgcgctggccacagcgctgcacgtgcagaacaagtcggaccacgaggtcgccttccaggcgctgctgcacacgtacctgtccgcggacgacgtgcgcgacggcggcgtcgtggtcgaggggctcaagggcgtggcgtaccacgacaaggtggcggccgcgcagcagacggagacgcgggacgtgctgggcttcgcccaggagacggacagcgtctacgccaacgcgccgtcgcccgttgtggtccgcatgaagcgcgcgggcggcaaggagcaggtcgtgaccgtggagaaggaggccttcatcaagagcggcgcctcgcaggtcccgcagcccagcgacgtcgtggtgtggaacccttgggtcgagaagagcaagggcatgagcgacttcgcggacgacgagtacccgaccatgctctgcgtcgagcccggacgcgtcagcgagcagcagaagctgccggccggacagaccttcacgctgcagcaggccatcaagctgtcggcactctaggtccgtgctgtgtgggacatgacgcgggaggccaccttggtagtgtagcgcaggggcctgctatcggagccgtccacttgcttgcttttaacggagttgattgtcgtgaagaaacgcggtgttggagttggttcctgctgtcgggtttggccaggatatgcgggcttcgactgggggttcttcaagcgaggctgatgaggtatgtcactgggatttgcagtgttggttgcagtgtctatttcggtgtgtcattgttcccaggttcgcttcaacttgctgacgagctacttttagcggagctcacaactacgaaaccccatgggcaaggctttcaaggctctgatggtatttttacttggctctgctggcacgtgcatcattgcggaagaagtgtggattgatagccattgatagacaccccccgctacaagagccttgctgcagccatgagcttgagcgcgcgatcgcactcggcgtcgagtcggggctcgtccaataacctgatccatggtggcggtggtggctctcgacgctaccgtcgtgttgcacatacgccgcaggtggatgacacgctcttcggtgagaagaaccagctactcaagagccgcaagaatgaccgcacgctccaagctggaaggtaaggacacgtactttgcgttgtacctatctccaagtacttggtactgaccatgactcttgtggcagggacattgttggagcgcatccaggcgcttcgtcgaaccaagaaggcggtgggcacgatgcaaagtcgacttttggaagccaggtcggaagacgagcagggaagcgagtagtgaccaaggcccaactcgtggtggtgcctgaagacgaactcgagcgcatcagggccgagacgaaaatcctgactccggccgatatcgaggcgctggaggccaagcgagaagccgatcaagagtatcagcgattgacgtcgaaggctcgcaaagagcacatgctcaagctcagcgaggaagcagcacaacgagctccgaagagcgagattgagcaaattttctccgctgagaagcacgagattctgcgccgtgcgcaagtactgaaagaccagatgcacgacagcgtgaagctgatgaagacgctcggcactcgcgcgcaagccttcaccattcgtgatcagcagctcaaggtgaagaaggagctagaagaggagcaccacgtgtacgacgagaagatgaacaccttgatggagatcgagcggcttgagagcctcaagcgccaagaacaccgtgatgaggtcaagaagcagaagcgatacgcagatcgcaaggtgctggaagaccagatcgaagaccgtcgtcgccagcgtcagaaggagagcgagatgatcgcccaggaagcgcaggagatgttggctaagattcagcgtcagcaagaggaggccgcggagaaagagaaaaccaaggctctgcgcgcgcagcgctcaatggaggagatcaagaggttcaacgaggacaacttattgaggaagcaggaggtgcagcgcaagatcaaggaagaggaggaccaggtgctagcgtaccaaaagaagaaggccgacgatctgcggcggcgtgaagaagaagaggctcagcgacgtcacgaagcagagctgcgttgtgccaagctacgctccatgcaggagaagatggcgaacgagaaggctgagctcgatgaactgcgtgctaaacgcgctgcagaagctcgtgaacggcaagcgcgtgaagctgacttggctttggcgaggaagcagaaggaagagatggatgagttgcggcgtgctcgcaacgctcaggctctgcaccgtgaacgtgctcgcgtgaaggaggcaacgctccagcagcgcgagtacgagtcgatcatggtgcaggtcgagtcggacaaggcgcgcgtgaagacggaggacgagaaacgcaagctggccagcatggcgcaccgtcgtgtgctgcagtcgcagatcgaagagaaggagcgtctgaagaagctcgcgttcgtcaagaagcaggaggagggtcaagcgctgaaggaggagttcgctcgagagctggagaagctggagcgaattcgtatggaggaggttggcgagctggttgaagcgggtgttaacccgctgtacctgtcggagatgaaagcgctcgtcattgagaagcagatccggtagacaccgacgcaataaaccttgataaccaatttcctaaatgtttcatgaagcacgtacggacggcaacgtgccccacggtggggctggtggggagttgaaacgttgagacaacttgccgtcttctcgcttttggcttgtccagctggaccatgttaataaaagcacaaccgatgccattccgtcccgtaatacaggtttctttggctataaaccagccccgcacctcatagctctccataaaatcgacgtcacttctagaccagctttgtggcgcacaagtccgagattttatcatgaggctctacactgtgctcgcgacggcattctttcttcttgcactcgtcaacgttgttgctgcgaacgcggctggagtttcatccgataccactcgattggcgggggagaacagcgtggacaagcgccacctccggaaccaggaaacctacgaggatggagacgaacgcaaggacgaggagagagggttcgtacgattctggatctgggaaggcagcctggggctgtttaccagaagtatctgaagtatttcgaggggttgagcatgagcgagcggctaaaacaccccaagtacaaacggtggatggcctacaaaaaatacttcaacaaagggaatccggtggctactactgcgtaggttgtgacaaccacgagatgcggcttgtggacttcaccgactgggaatacttgagaagaattccgctgttggtgcctagagctaaatagacgaaaacgtcgtttgatttaccgtcttcaattaattcactctgtcttcggacagtgcgacgttctctcatcaaagttggctgtgctgatccatgttcccaggcctagcagccgtggccttctgcagcgaaaaggctacatgtagccgaatgctttatctgggctctatttgcatcaattgcgctggaagctttcaggacacctgtaaggttctggttgtgcttgttgtgttgcgagtaaaatggaaactgaattgatgtctttgtctgtttgctgctatccatctacccgagggcgccctcatggcgctcggtcctaaacatgaagtggttggctgaggcgtgccggagcaggagcttgcgcaaccggtgagtatgcagacgacgacttgggctctctgcgtgcggactcaactgatgatgtggttgtgttctgctcttgcacgtgcagatcattacactccccccgacttgagcgagtcccggcaccttgaacgttgaagtcgccgaagttgaagttggtagtactgtagaccctcgatgtaaggaacagtaccgtgaaaactctgttaaagagaattccactaggcccgtgccactcgattgcgttggcgaagatcttttagcagcgcttgccagtggctgacgtgtttgatgtcgcgctcgcgttcccacgtgttctcatggtgagggagcccgtgccacttgaccaagtactcaggttggcggttgaagatgcgcttcttgatcagagcttcgacaacgtgtagtggctcgccatcgtcgtcgaaaatcacgggagtcgacttcgggatcacacggccgacgaagcgatcagggttgctgttgtatagcttgagcttgttgatgttgaagcgtgggctgaagtgcttaaagttggccggtagatccagcagcgcgacgttgccgtgaagttcctggatcgggtacggactgatgaagcgcgggatgaacttccgtgagcgaagcgtcgtttccgcgatggcgtgcgagatgttcaggtcctgcgtcgacagcaaggctagatcaccgaccttgaatgggtttgctgcacgacgccggtcgtagaacttcttttgagcctcttgcgcatccaacagattcttccgagcacgttcgatcatctcttgacgatgctgaacaaatcgagacgcgtactccaaacgagacctcgccaccggctgatcgctctccacactacccaatgggttcttagggtgacgaccggtgtcgacgaagaagggcgacagcttcgacgagctggacaccagtgttgcgtgcgcatactcaatcatgggcaggtgctcattccagtcgttgccatggtacgaaacagagcatcgcaacgagtcctcgagagtccgattctgacgctcagtttggccatcggcctgcgctcggtgggcagtcgtcatcgctgtcttgatcttcatcagctgtaccagtgcattccagaacttcgacgtgaacttcgggtcccggtcggagatgatggtcgatgggataccatagtaccggatgacgttgttgaagaacagcttggcaatgtcttccgcagtcgccgtggtgtgcgtcgggatgtagactggacgctttgacaacttgtccaccacgaccatgatcgcatcaaagccgtcgaacacaggcaaatgcgtgatgaagtcagtcgagacaacatcccaacacgcagcgggcaacgagatcggctcaagctttcctgctcttcgtccggtgcttgacttgtacctcatgcatgactcacaactctgaacgtaggctttgatgtccagatccatgctcgtccagaagtaccacggtgccgcagcaagctgagcgcgacggatgcctgggtgcgccatgatcgccgcatcatgcgcgttgtgaatgacatcgagccagagtttccggttgtttggcacacagaggcggcgtaggctgtcgttgctcttcaaatagatcaacccgcgaatgatttcgcactcttccgacgggcgaccggaggcttgaagactgaatctttgctgtatgccttctgaaacgctcgcttcgtttggttatccagttggagtgagcttatcaccgtgctgtccttcatcgatgctgcgttcaatctcatacgccactgtgccgtgcctacaccatgtgcccttgcgactggctgtttgacggcaagcatcacggcttgatcgcgagtcggtatgctttggagcttctccgtagccttggtacgacgcgatgccgcgtcgcgaatgttcgtgcatgtcggcgacgtcaaacacgccgtacacactgccagcggctcgggttcggtttcaccagcctccggttcctcccccggacttgaagaagcatcaggggggcgcgatgacgcgtcggcgacgacattcaaagcgcctggacgatgatgcagtgtgaactggaaggacgcaaaaaagtccagccagcgagccaagcgaccagacaggcggggatgctgtagaaaccacttgcacgccgagttgtccatgtacacaccaaacgagactccatggaggtaatggcgccaacgggtgagcgcttgtttgatcgcaaagagttccttctagtgaacaggccagttcagctcatgcggaccaagcttcttgctgaaaaataccacggggagatcattgccgccatgcagctgagagaggactccaccaatgcacgcgtgactagcatccgttgtcaaaatgaacggcttgtcgaagtctggcagacgtagtaccggtgcgtgctggagcgcaagcttgatggtattgaaagcctggcgctgaccgtcatcccatacccacgccacatctttcttgactaaagagctcagcggaagtaccagtgtcgcaaactgatgaatgaagcgacgataatatccggcgaggcccacgaagcgctatagatccttgatgttgctaggctctgtccactcggcgatggctcaagtcttgcgagcgtccacgtgcaagccatcagctgagatggtgtgaccaaggaagtcgacccaagcttgaccgaagtcgcacttgtccggacgagcgtaaagcttgtgagcccgaaggatttcacagacttgccgtaagtgctcgacgtgatcggccatcgaccgcgagaagatgcagatgtcgtccagataaacgaccacgaacagtagatggctcagcagcttgcgcaccaggcgcgtccacgtgcccggcatgccggccagtcccataggcgccacgttccaatgatatatctcatggtttgtcctgagtgccgtgtactgcttagacgtcggagacatatgcatctggtggtatccactggcgaggtcgagaatcgagaagatcactgctcccaccatccgatcaaagagctgctcgatgtgcggcagcggtatcttggcaacctctgaggccgcattcaccaagcgatagtcaatgacccatcgaatgggcatgtgcggattgttcgaatgtagccactccaagcgtgatgggaatttgccagtcgcgggatcctttttgggcacgccaaagatgtttaatacccgtggagagtccgacacttcgatccagttcttcttcagcagctctgccacaaagatgtccaatgcctcctgctcaaccttcgagagacggaagggggcgcggttgctgggcgtcgcacctggtttcaagaccacttcgtgctcgattgagcggctcggtggtaatccaggcggcaactctgacggaaagacatctgcgaactcgtcaagtactgcttgaagcttcgacggcacggacttcaccttgggcgacgtcttcaccgtgacattatacagttcggcgtactcgtcggccttcacctttgtctcaaactctgtcgccgagaggacacacaacgacgatgcctccgtgtcgtcatcgccttcgttgtcaaagatgcgtggcaatggctgacattctagctctgctatcgagcttggccccaaaggcatactgaagtagcctgcctttacacgagcgtcaagctgctgccgcagattcgggggcagggggtgctgaaggaactcaggtttcacttccactgaagccactgacggtcccgctacctcgagactgtcgttcaccgaaatgaaatcatgcactaagcgcttgttagggaaccgcatcactccggtttgccagtcgataaccgggttgaactgcaccagccatggaagcccgaggatcacgtcttgatttgtcgacacttcccactcaatgagggaaactccgttgaagtctctgccagcaaagctgatagtctccaaacattgttgcgccgtacgggccggcgttgtcgtaccgtccaagcgctccgccgtgaccttggtgaactcaacgcagttttgggcgaggcaagggcgcacaatgttgcgctctgcaccgctgtcgatcaagattcgcactgcccgcccgttcatcgccccctcgaatcgcaacagttcacgattgggtgacggctgggtggcgatggacaccatgttcaactgcaagctgtcaatgacctcgacgtggtcgtcacggctgtctacgtagtcgtcttcgtcttcgtcggatacgtcgtcttcgacaatgcggcggaacgagccctggttagcgcggaatgacccgcgcccttgtggaggacgagacacaccccgggggttgttgcgcgctggcctctttggacacgtggccaggcgatgcccgggttccttgcagtagaagcacagattactgcgcagacactcgtcgcgagaaacgaagcgcgagcttccaatctccatcggtgtcggctcctcgatgcgatgtaacgactgttgaaggcgttggccaccttgacctccgcggttcgcatgggttcgacgcgatcctacagcgtgcgttcggtcgtacatcagtgcaaatgaaatcgcgtccgtcgtgtttcggaactggcgcagcttgacctcctgtctgatctctacgaccaaccccttctgaaaatgcatgaccttgtcgatatcgctcatgtcctctaccttgcagatgatgtgccggaaggccgacacgtaatcttcgaggcaggcgaagttgttctggcgtaggcgtaggagctggtcgcgcaggtgctcttggtgatcgggggtcgtgaactcgctggtcagcagctcctcgaactgcgagaccgagtgcaggaagttcccgtcgtgggagacgtactcgcggtaccacgctgctgctggccccttcaagttcgccaccgagagtgacagggggcgctgctgcggtgagtcggcgccgtacttgatgttcttcaactcaaagtagagtttggcactgaagaggtagtccgcgacatcgtcgtccttagtgccggagaacttagggatggagatgccctcggcacggtactcgcgcgtgtcttgagaagtagagtcgggcgacggtggttgttgctgctgctgcgaggcagactgctactgcagttgctgttgcagtgtcgccgccatctggcgctgcagcgccgctgtctgcgccatgaactgctgttgctcgcatatcatcgccgcgagcgaggcgaacatctgctgcacgctgtccgcgtgctgcatcgctgcttcatccatgtttgcgcctacgctagccacgtcgtcaatagatggctggggcgcgcaagctcctcagctaaatcaatcaaagtttgaagtcgcaggcactccctggagcgctgcttccgacaatgtctgtaaaccccaacgaagtcacagacgcccgacctggagctctgcttccgacaagtaccaaccacttgctccagtgtcccgaaggaagcaactggtgcaattccgtccggcgctagctcgagtccgcctcggagcacaaagactcctactactaaactcgtaacggccaccgacgcagatgttacactcggctgcgcactgtttgcaagtgacagctgaggcgacaagcggaaggtcgaggtgggtgccgcgtatggacacgcggaagtgattgggctaaatgcacgaatgagatgtcgacacgaagtgacgtgtgacaatgtgcgtcgccactcctcccccagaaagaaaaggagcgagctcggcgaaaatggaggccccgtcggcgacgagcggacgaggctgcggacgaggtcacgcacgcggcccacccggagaagttgaacggcgagaggtacaggtgcagcacaccgaagaacggatgcgaggaagacggcgtgcgcaacggcaacgcggggcggacgaggctggacggcgtgcacaccggcgacgcgtggcggcactggaactggaacgaggactggaacttgaaccggaactggactgaagcgcgcgtcggctccgcaagtgctaccaagtgtaaggttctggttgtgcttgttgtgttgcgagtaaaatggaaactgaattgatgtctttgtctgtttgctgctatccatctacccgagggcgccctcatggcgctcggtcctaaacatgaagtggttggctgaggcgtgccggagcaggagcttgcgcaaccggtgagtttgcagacgacgacttgggctctctgcgtgcggactcaactgatgatgtggttgtgttctgctcttgcacgtgcagatcattacaacacgggcccgcggctgcctatcgcaagttgcccaagtgttttaaggggtcgaccgcggaggcacagaagaagaaatcaaagtaccagctctggtttgcatacacaagttgggacaacaaggggctgtgcttgaggctgggaagacagttgaagtgtgagatacaaatgtatacttatcaggaaggtcggctatcttgcctatttggcgcttccatttgagaaggttagaatgggtttgagttaaagtcctgcgaatcgcttactaggtttcggagcctgcgatggcctaaacagtaagcaaagaaatattcaagggcgcggcttgctgcgcccttgaatcacgcgggcagcgcattgtttccacttcaccactttcgagtataacggttggtcgactcgccacgattagcttgactaagcagcgtgagcgacagtgacgcaacgagaagcgattgctcgatcatgtcgtatagtttccatgtcctggcacaacgacgacgtcaatgcattctggttgtcaagctgatttgtgtgaacgttacgtgtcaccgatgtgatgttgtccgaatggtgcttgtggtacgagcaacctttttttggacgaattaatgtctgtgaggctgtccatacagctcttctagctgtcttcccaggacaagtattattattgtgcttcgcaaacgttttgtcgttttgacttggagctctcctcgatttatcattaagtcgaggtcgatttaataaaacgagatcaaagaaagggacagatcgatctatttaggccggctaataactcgagctacgacaatccaaatcagggctcgaggtcgatctcctggtggatctgggcagaacgaggtcgatctacggtacatcgatcccttttgcgttttcaaaagcgcaattcaaggtcgatctaagtaaatcgagataccgcctctgttttgtaccctgatttgtggaccggccttcctcgatctaggccataaaacggggcgacatttatctgcaaagcacaataacttcccagttagtgtgtgtcggtttagagttcaacgtaggaattttcaggcatgtcaggagggggtattgtggacagaaaaagaacgaaataccccttttaaaattgccaagagtaccccctcttaactaaggaaatgcaggcgtggaagccaacttgcactgccatctccagcgtctgcagaaggttatccatgtatgcaacgaggaataggccaaatacatggctaataacactcttagcacgtcgcaagcgatgtcgaatccagtagtatcgctcatatgtagctgtaagtcgggatcgtaccgcctaaactcaagttgaagactccattggtggctagttgctcacttgagcgtcaagcgccgaacttgtcaatcatttctaaacttgccaaacaacggccaacccaccaacccaccaacgcccatgccacccacttcatcttccaaagctcgcggaacctccaaaggccgtgggaagggtcgctataagccgactacaagttcaactcaggcgactcgaaagctgcgcagtgttaacgacgcactaacagcattgccaaccaaggtgaagctgccaacgcgtcagcaatggtttccaaagtatgagaaggagctctgcgttcgtccgttcaactacgtggaaggcgacgtcgccgaggcgatctgcaaattctgcgaggtgttccgacgggaagatccgccggacgagcaagacgattccgcgttcgatgcgttgatgaggaacccgaaaaagaagcgcaagaagatggctaaagctatggtgttcaagacgtttcgccgcgaccatatcatccgacacatgcagcgcgagcactcgaagaagtggtctgccttccttgctgtcacggaggacgaagagcgcgaaagctttttcctgcctacccggatcgaggacttcctcccgagacaccctcagatttcgtttgtggttctgagcggaattgccagcctcatcaagcgtctgttctgcaaccgaggtgatacgccacacggcttggtgactgtggacgacgaaatcggagaggttgaagtctccaacgactttatggagaccgagacggatggatacgttctagttatccgtgatcgaggccagtttgagaccattgtcagctgcatcaacgcgggagtaagctttcgtgccattgctggtctgtttgccacgttcggaaccgcgctgtccaacatgaagcctggattcccctgcagacaagtagtagggcaatcggttcgccgtgtcgttgctctcaacctctctgctatccgctcactgctcagcaagacctggggattttcgctgatggttgatggcgtaacgcaccacaaagaaggatacctggacgtgcgtgtgtcgtttggcctcgtgggtaaaattcacaacatccacctcctcgccatccccattggcgatagcgcccacacaggcgagaactatgctgagcttgtcattaatctactagagcacatcggtgaaaccaacctgctccctcaactgatcggtgtctcgacggacggagctgcgacgatgctaggccgccaccagggattctcgacgcgacttcgtgctgctgctgaatgtggtatcgcagtacacacaaaatcgtcagttgtggtaacttggctacaaacacaacaatagccgagctggtcggctttgttggcctgcaccgggttgcccccgagcggttcggcccaaccgggacagcgggtgtctcgcctctcgccgagacctgccaaccaagatcactcctccggagaaccgccgagttcgacggcctccgttcgctcaaccctgtgccctccaccaaaggatggacgacggcgcacggagcgcttttacaggtcgccgagagcaaaggcttctcgactcagcaatcagtgcccgggacgtacgggaacactggctcgcagcggtggcgagactttccttcgcgcttggcgagactcgcgcccaacccgggccgaccttaatctcttggcgctgccagccgagtaccctacaagctatgcctctcgggtaccggcagcagacataatccggccccgtgcagggacttaccggaacgtgtacacgtgctttaggcctagaaaatactgctctgttgtttgttatctctgtcgggcgccctgaaggggcacctccactattcctaagctcctatacaaataccaaatggaagtggtcggttttggatctcggccgactcttcgctgagctcggcgacgcctgagctcggctggtccggatgagctatccggacaattcttcgaactcggctgagccggataaggtgtccggataagctggtgaactcggctgagctcggctgagctcggctaccggtacagtgtaccactccagccgagttggtcgcgcgaaatctggtgtttcctacaccacaactgccccggtcatgttccgagccgagttggtgagggacctgaccatcactccttgagtcgagtccaatctcggccaaaactccaacggcagcgcacaagtctccacgccatgtcgtcgtccggcgctcctgccgctcctccggtacgttcctcgcctccaacggctccatccattctgctgctgacccttcttctactgatcttcacagacttcagttgcgtcgtctttgcagtcttcacatcttcccgcgcgagatgaggggaagttcgctgagttggtcgactcggcgtcccgggctcgcggggtcagcgatgagcaggagcaccctgtcatcgatctgacaacttcccgtgggttcgaccgggagtccgagccggcatctcgcacttctcctcgccgcttgccgagtccgcgtggcgacaccacttcggaagccgccgaccttggtcggtcggactcggctgggccggtgagtctcgactctcgctgcgctgatccatgcgcagtccgagcaacgccgcatcgagaacgcggacttggctcggctgttgtcattcgtgatcactcgtcccgcgccggcggctgatagagaggtccgccgagctgccctcgaggcgacgtccgtcagcgaactcgtgagcctccttcgcggttagcaccaaccttcaagtcaagctagtgacgtcgctgcactgagggtcgagctggagtctgctcggactattaacgctgacttgactcggcggctggattcacaggcgactgtgaaggccgacctcgaggaacggttgaagactatcgaggaggagcgtgaccgatggaaagccgagtcgaagaagtcgtcccctctcctgaccagcttccggaaggcgatggccgagtctgaagcttccttgaagtcggcccgcaagtctcaggatgataaagtgaagtcggctctcgctcacgctaaggatctcggcaggcagctcagggaacgcgactcggcgattgagcgtttgactcagcttctttcggctcgtgacgccgagtacgctgtgctccaggggatctcgaccaagcacttcgagcaactgcaggagtcgtctcggctactcatttatggagacgcccagactctccgtgatgccaaggctaccatcaaacaccagcgtgaggtcatcctccgacagaagcgtgtcatttctcgcatgggtcttttacccatgcatgatcctcacatggctgctgcagctgcagccgggttggacgtgcctgggttgagccctgctgacttgcagcttaatgctcggttatgccggatcttggctcaacgtttcccggaggttatggacatcccggctggagagactcgtcgagtcgagttgaccatccacccgcgagcggacggcgctgctactactctgccagcgaccgtgagctcggctggttctttccttggacaatcaacccggctgactgggtctgaggctccggcccctctaagcgagtctcccgcatcatctgccgccaatcctgtgtcggctggtgcggtttgtatgcccgtgtccacttctgcttcgcgccgtcgccgctgcaagtcggtcgaccaggttcaccgagctcggctggatactctgacacccgccgaaaaattacttcgctactcaaacccgaagtcagcgacggcggctggttctcagcgcaagcccaagaagccactcgagcagccgtacgcgtgtccacttcctggtgaggtcggccatgaggacgcgttggtccagcttgaaaaggctgcccaagagactgacgccgcatgcgacctatcgctccggtcgagcttgaacttagccgggttgactttcgacgatgtgaatgtggaggccggcgacgaggttcactcgctggaagaggacctctcgttcgagttcaccgaagtgcctggttccgccgagcttccgagggggcccgccggcccgaccgtgagtgtgccgcccgtgcaactcgtgccttactcttcctccccggtgcagacgccttcaagcggagtggcagttgtatcgttgcctggatctgctgaccttgctgcaactccgtccgctttttcgcttcctgcctcggttccgttcccgactcgtgtccggtgggttcctccctcgaccagcgtgccgagcgcggctgtggtgacatcaactgtcggcgccggaggacaaccgggttcctctgctaccgatccggcgcttgctacaacgcatgctgtgattgcgccgagctcgacggctggagtctcggctgcgagtacaattaacagctccgctgcgattccgcctcgggtttcgcagtcttctccgggttcggccgctcaccggctcttggaatgtactcgttcccggtttgccaatcaagcccagagtcgtcgtggcccgtcaggggtggcatcgactgtagtcaccccaatgccgagcactccgtcggtggcctcgacccggccagctgttcctcctagctcagctgggatgacttctccatcgggtcgccctttacgctccactgcggctactgcccgagtgttgaacgctcactgcttgaatctgttagagacgcctgactctctcgtcctccggtccgctcagcgtagctcttcctctggttcgtcgggctcggctcttggattgaatgctcctggaacctcagcacatccgttgtctttgtccgagagctcagaatctgaggctgacgaccctggatctgctgacgatcctggatctgctgacgagctcagttcggccgaccctggcgcatctcgccgggcttcgttagcttctgcgctcccacctccgcacgggaagatccagagctacatggctgctcgtcaatcgcctctcgttccgtccagcgagtcaggtgactcagactcacaggcgagttccaagaagcagagcggtaagggcaagcacaagcggaggcgcaagcacaagctcaagcacaagcacgagcacaagcacaagcacaaacacaagttgaactcgaagtcgaagtaggcagggtcaaagaagtcgaagaggtctgcgtctctggactcggctaagggccctcgcccgtccaagcgtcagcgaggttcggctggggactcggccgtcggtccggctgaggtttctgccgcttccagctcgactaacaaaccggctgggagctctggcatcccatcgagctcggctgtttcgccgtcgcctatttctgctggtccagcttcaaccctgtcggtgcctgtcgtgaccgctcatgacgctggcgcccacgttctccctcagttgcctgcagctctacgctattcgctcgctcagctgcgcactcgagctcgccaggcggtcggccgagatgcccggatcactccccagctagctcagctgcgtgacatccgcttcgttcattacgggtctcggcggtgctgggaggctatcctcagccatcaaacggccaaggtcactgtggatggcgcgtcggggaagggtagtgtgccggttacgctctgttccctcgctgggattaaagcgttcgcggacgtctaccatccggatcacccggctcagcggctccttcgtctgcttcccaagactcctatcttcttctcccctcaagtcctcgacgatgccaagcgccggttgacgaactcggtgaagtcggtgaccttgatggagcgtctcaccgaagtgttcgtgaagatccgcggagaggctccgaactcggtttgtgacaaagagggtcctaccaagttcttcgtagcactgttcgagcggtgtcactggatggtcgagtcgagtgtactgatggggctacatccggcttttcacacggggctcccgtatcacgtgatagccgagatgtatgacacgtgggtgttgtacaagttggctcgcaagcgtcgaggcgatgccctccgaagtctcatgactatcctgccggacgacctgttcactgcagtgatgacacttctcggcgggcttgctgccccggaaatcaacgtggagctcttcttcgagccgtcggtcccgttgtatccgctggtcaatcttgcttggattcctgcgggcagagactggtgggctgaagccgagtctatagacgactccgagccttggcgagcttggtggttgaccgacccagcgacgcacccgtacaacacctgcttccggatgcgtgacttggaattcatggttttcgctcccgctggtgtggatccgcgcctagtcgaggatgctgtcgatgaagatgtggacctcgacgagcctgcgcctccccagatttcgtcaagtgctccgactccggtaaaccgtgcaggaatccacatcttccaaggttgcaaagctggtgagctcggctgggctgctggctatgcggatccggcgtctccgttgatcgggtcgcctaacgtgtgcgacccttctcccacgacttacctctttggtccggcgtcacctgggtctccagatgagttgagcgcaggatcgagtgtccctctggctaacaactcggctattccggcttcaagctcagcggactcgctgtgcagactgcgggagtagcggatagctcggccggctcagctacgaacactggaggttcgattggtctcctcgcagcggctgctgctaccgtcgtgtcctctgtcgcgcattcacagggtccttcggctccgtaacgtgcggctcagccgccgagctcttcttcctttcccatcattcttcggtgtaattcatgtaatgtatgcaatttggcgcagtagcttccttcgcctctgctgtcttcactgagttggcaggttcatcattttggtgcaatagctttaatcctcgtctgcaacttgcaccatttgcagacggttttcacgcttcttctgccgtaagtagtcgaacaataatccccacacgacaaattcgacagcggctcccaggttggcacatcatagccgacccacttgaccttgaacttccgctgagttctggaggtgctcgtagagagcgacaactcgtcgtccaggatggcttcgacttcgtattcattcattgcttcgtcgggctcccagctatcttcaggaaggagttcctcgtcaaagtcgagacgatccgactcggctaagtcggctactagcctagttgtcggccgctcgccgagtcccgtgaccgctttcagacgtgacacatgtatcacagggtagaaacggtatccgctcttgtccgggagttcgagctcgtaggcaaactcctccaccttcttcttcactcggaatggcccatgccatcgatgtgctaacttcttggtcaagccaggtctgactcgtcccatgaacaaccaaacttggtcaccttccttgaatagtgacttccccgactcagctaactcgtcaccttcctcagtcgactcggctgctccctcgggtgagttcgctggggtatccgtcccttcctccccggctgggacagctctctgctcgactcggctgagtccgtcatggtgttccttcgctccccgtttcttctccttcaactggaactcggccgcaagcttcaaagccacctctctctgtcggtttgcttccctgcgccattcggctgcccccgttgagtcagctgagttgcccctgccgagcctgactgagtcggtcatcgccttgagtgtagaccgagcgtctcatccgtgttccaggtagaacggtgtctcccgccgagtcgagtctctcgaattgttgatggcatggacgagcttctcggctacatcatcccagtcggcttggagagggtcttccgcgtacacacgcacagtctggatcatggtcttcactgagcgttcttgctgaccgttggcttgtggtcggtaactcagcgtcgctctcgacttggactgcatcatctccgataacttctggaacacttcactcatgaaccggggatctctgtcgtggcgtaccagtgatggagctccaaacctccggaacacgttttcttcgaaggccttcgctacctcaagtgccccagtctcacttattgccttagcaatcacgaacccggtgaagtggtcttgaaacaacaggagtgcagtgttgccccgccgagtcttcggcagtggtatgacaaagtccatcgataccacgtggaacggtcgctcagacactacgttgccaggtgaatagcccttcaggtgtggtttgctcttactggtactgcagtcttcgcgcgcttggacatgtttgaccacgtctgcgtacaacccaatccagtagtagtcggctctgaccctgtggtatgtccgcacaatccattggtggcctccctcgatggagttgtggcagttctgcaggatctcgtctatcatggtcgtcggaaccaccagtcgaagggataagcctagttcgccgagttcgccaggtggtctggccttgccttgtcggtacaatagcccgtcttcgctgagcacaaactcgtcggcaactatcccagcgttgtgagctcggcgatgtgtgagctgcgcataatcccctctcaggtaggtcttcaagtcggcccatcgttgttcctcgtcttgaactcttgctattcgcaggcggcgctcagcttggaccactaccggatcgatgtccatggcgttgggctcccgggcttctccgagctcggctaccagctcagctgggctagctggtggtgctgcgctaccgaactcggcttctcccgtcacccgctgtctagcaggcggaggtcggctatctcgttcaaagtcattacgttcggcttcctcatccgtagttgggtccgagactgggtgttctgccgcttcgtcttcgaaacggactcggtggacttgactccttgtcacggcagccatctcaacaccctcggccggggctgcagccgagtccgtgtccacgtacaggacctcagagatcctgtttagggtcttcaactcggctttccgtccggcgcttagcacgacctttcctgctttggtttccagtgcctcggtcgctaaagcgtcagcagccgagttgtagaggcgcactacgtggaggtagcgaactgaattctgcttgctgaccaatttcttgtggcgtgctaactcgacttgcaatgcctccttcttacacgcgatcacccccatggattgctggatcgcaagccgggagtcgcccacgatgatcaaatccgtcaccccgcgctcaatggccgaggtcaccccattgttcatgccggtgtactcggctatattcaccgtggtcgatgggaggtgcgcgctcgcagcgatctcaatgttccagtctggcaaacgccacaggatccaagaacaactcccgaaaccgccgtgtttagcagtcttcgccgatccgtcaaacgacaggacgtgtcccttgaagtctcggggcacatgcgcatacagcaattctgggtccatgcggaccacagccgagttcttggacggcggagtgacatgcgttagtagctcgtccaatcccactgccggtgtgatcgacgcttggagcaactgggcgaaatccgtgtcccgttcgcggacccacttgaccttttggtggaacggtgatagcagtaccgcaaagctgactgctctgccgtggagagacttcgactggaacacccattcgagagtcaagtagcgggtgtaaacatggatggtcttcccggcgagcaacgtgtggtacaccttgatgagctgtagcaaggcgagaacttctttctcggcgggatggtagccgagttcattatccttgatgactcggccgcagaaccgcactggatggagcttcccgtcgtggagctgcatcagcgtgctactcagagcccactcattggcgaatagcataacgtggacgtcctcagccgagttgaagtggcggagtatgggtgcgtcgaccacctgctgttttaactcggcgaacgccgcttttgcggccgtcagatcaccgccgggtccgaaatcttcgtccttcagctgatagaggaccgccccatatacagccaggttctggacgaaccggccgtagtagttcagcgctcctaagaatgcttgcatccccttcttcgtcgtcgggaacggtagcccggctatcaccagcatctttttctggtcggcttggattccagccgaggtcaccccatgtgacaggaagtcgactttaggttggacgaagatgcttttcgggaagctgacgctgatgcggcattcagtgaagcgttgcagcaatcggtcaagcgtccccaagcaatcgtcgaacgtcctcccaccgaagcagatatcgtccacaaacgatcgccggtcgaaaaccggtgcaaggcacgattcatcaggttcacccgtccggaacatgtcggcttctgggctgttaatgaattcttccaatgggtctaactcagcttgagatcggcggtcggcctcaaacttggtctggccactggcttcaaagtcgatgtcggctgcgagccgtttccgctgagcttctgaggcggcttccgcttgttggatgcgcttggcgaacaccttccagccgcccttgggttgtacgtaaccccacagaacgttatcaataaggcgctggtagatcattggggcattctttaatccgaagggcatccgtagccactcgaagtggccaagcgcgcaaacaaaagccgagatccaacgcgcccgtccgtcatcataaccgcccagaaaccgctagcagcatccaaagagcagaaccataggtacgcttccaactccgtgaggagatcgtccactagcggcatggcatactccatgagcaacgtaatcgcgtttaccagcttgtagtcgatacacaaccgaatgtcgaccccattcttgtttaggacaatcacgatgggtgatgcccatgggctgttcgagaaggcaattagccgagccgtaacagcgccttgagcagctcgtacaacttgccgagatgcttcagcggaactcggcgggctcgttggcggattggcggatgcccctgtacgtcgatgtcacacactacgccgtatgctggtggaggttgggcattaccactggagatcatgatcttttcatggctcttcaatacttccaccagccgagtagactgtggccgagtgtgcgccgagctccgaacgtttgacgcttcatagtcgagtggcgtcgacaccgcttcagtcagatcgggcaggaacgccaactcgcgagcataaccttcgagctccaagttcgttgcttggtgctcgaactcggctgagtctctcgccgagtcgcctcggccatctgtctcttcctcgtacttgactgccagaaggtaacgtaagcgcagatcttcctccgggtctgacgacatgggctcgtcgctcacatcgacctcatcttcgagccttggactcggcggcttgggcccggggtcgtcgatgatcgtctagtcagacaaatcgctggattgatcactttcacactcatctgctgcacaggcgttttggctgggcgcttcttgaccagccgtcactgtgatctcttctcgactaggcgggccattgaccaagtcagcagtaggctccgcgctcaatgctaattcctcaggcgctagggtagcggtagccgagttcgctggctctgtcggaatcgagggtggactatcgactgcttctgcctcagctcgctcctccgactcggctaacttctcccattgctgggcgcaagtcagtaccgaatcccgctgcttggtagacggccacgtagtcacccctttcggttcagggtagtttctacggtccacagctgacagctgtcgagccagccactcggcgtacagctgttgttccttttgcagcagatccttatccatagccgcttcgtaggccatgacttgccaatctttgtacttcgccgagtgcagtctgacgtaaccatcgggcggtaacaccccatgcggcgcccaggcaaccactgggaaatgtgctgggcaccacgtccaacccggcttaaggttggtcaggcgaactcgagccactcggttacgccggtcgaataccacggtcggtacccagtccttagtcgggcgtacccagaagtcatgtgtttcatcacttgtttgattcctcatcagcctgaactcggcgggaactcggctctcgagattcaccggttcggtcgggccgtctgtgatgtagaggccgcccttcggttcatccgctgagttctgggacctcacgagacgtaggacaacttcatctggcaacttcgccgccgagttgtacagatccaggcggatcccagccggaatcatgaagtccgtaccgagaatcaactcgactcccgcgtggtgatcgaggatccatacttcaaattcatacgtgacctcccagccgagcgtcaccttcaccatcgctcgtgacatcggcgccactttgactttcccaataccttgaacgccaatctgttggtcctggcgtgtgaaccgcttcaaccgcagcctcttcgcgaacccttcgcttattgccgacacattcgcaccggtgtcgagcaatatctttgtacgctggtcgttcactgctcccataacgagagctctcatccgaactcggcggtcaaacttttgtgacaaccaccagccgagtcgctccccagggagcagcttcataactctggtggctgtggtcacatccgtcgatcgctgagtcgcaactgcactgcacaatcttgctcggcttccttctccactctcgccgagctcaccatcaagtccatcgctttcacaatccaatacgtcgtcttctcctcggtcctcgggccttcctgcctcacccacaaaggcaaacacaagttcgcctctactgctggctcagctgactgtggcagcccggtatcatctaacccagtcagtgttggctggccgccgagtttaaatcactcggcgtgtaaaggtcctggaggtcttcaggtaacttggacttgtcgacattggacttgacaattgcggcgagcttctcatagcgctggaacagctcgcattgaccgacatcgtgcaattgcttgcagaacttgcagcgacggcggcagtagtgaacggagtggttcgcaccgccgcaggcagcacaaggtccatacgatgagcgttcacgggagtcaccgcgccgcccagtctggtcacgccgatcgaatcctcgactggcgcggtcagccgagctcggctgaccccttcggtgatcactccttggtgtcccagctgagttccctcggccccccgatctacggtcgcggtcgctggtgaacccggtgtcgatgcaatcggcttccgagtctacagccgagtcagagtagctcagctggctgccgtcgctctgatcgctgtccgagtcgtagaggttggatcgccgattgggttggcgtctctcagccagctcatacgggtcgtcctccagcagcgctgtcgctagtcggcgttatcgaccatcgtcgcgtcggcttcgtcggtcatctcggcggtcatctctacgtcgttcccggcggtcgtctcgacggtcgtctcggcgcggctcactccgccgagcttctgagtgccttggcgaatcggcgcgcttggcgtctcggctgcggctttcgacgaaacggtcgcgctgtttcttccggcgctcccccaggatcttctggttgatgatcttctcggccttcttgatgtcggcgagctgttgcggatagagcagatccatgatgtcatcatctccgcagtgcaacaggaagtgttccacatggtcagcagcatccgctccaccggcctcgtactggattttcgccgacttcgcatatccgttgagacgaacgaggaagtcacacaccagctcgttgtctttgcgctgagccgagtaattgcgagctcgtgccgactggtcaaactacgaacagtagtagtcggcgaatgcctcactcagcagactccacttccgttgcgttttcttcgggagctggcgataccagctcttcgcgcctcgctccagcttcagcgagaatggctcgtaccagaggtcttgtgccagccgagttcctttcatctcgtagatgaaccgcttaagccactggagagagtcatccggtcggtaacgtttgccttcgaacatagggatcttttcgacggacgcatgggtgcgaacctccaagtattgcgtccgatcactttcagcgtcatcgaagctaaggtgcttgatgacgtccttcaccgactcttcagccgagttcaggtactcgcgcccatcgtcgctgccgctgagctcggctgcgtctgcagcgtcaaacaactcagcgtaccgtccacttggctgcttgccacgcgttggcgtcttcatatgcgaatcttcgaaatacggcgtaccctcagtagagcggaacacctcggctctcttgcgttcgggagtcttcggcaggggaatcctgctggggtcttcgacggtcttcggagtatcagccactcgtttcgcaatagtctgccgagttccaacggtcccccgctcgagaccaaacgagactctcaaccgacgcttccacttgaggatttcgcgtgaagctcggctggggtcccaatcgccgagtagcaggctgttgggtcggctcgtgcaccggaaccccatcgccttgagtagcagcaccgcgtcttcgaccagttggttgatgtcggtgctgttcaccggctgagtcagctcgggccctagcaccggccatctcgcctgagccatcgccactggggcaaacatcatcatccactcactctgagctcgcatctcctctccgagcctgcccagaaccttgttcgcacttggcgtatccgcattcctcgtcgctcgcgggatcaggggcggacgttccccttgagcggcggcatgatcttcgtcgtccgtatcattgccgagctcggccgccaggttgcgcacaactggacgtggggtacccattcatccgacatgcagcgacaactcgtcgacttcgccgagtagctcggctttctcctcatactcatcctcaacatcttcctcactttcttggtcttgggcatcctcctcatcgaactggacggtgcgcgtctcgtccgccgtcgcgtccgtgatcatcgcattcgccgagtccgccgagttggtcagtccagccgagttacttccaaccgtcgctggactcggcgtaacaattcccttgaccatcttcacactctcttctcttctcttcttctcaaaccttggttagctggtacctacgaaacacaagcacacccctgttcccgggtcgcggcaccagttgtggtatagcagtacacacaaaatcgtcaggtgtggtaacttggctacaaacacaacaatagccgagctggtcggctttgttggcctgcgccgggttgcccccgagcggttctgcccaaccgggacagcgggtgtctcgcctctcgccgagacctgccaaccaagatcactcctccggagaaccgccgagttcgacggcctccgttcgctcaaccctgtgccctccaccaaaggatggacgacggcgcacggagcgcttttacaggtcgccgagagcaaaggcttctcgactcagcaatcagtgcccgggacgtacgggaacaccggctcgcagcggtggcgagactttccttcgcgcttggcgagactcgcgcccaacccgggccgaccttaatctcttggcgctgccagccgagtaccctacaagctatgcctctcgggtaccggcagcagacataatccggccccgtgcagggacttaccggaacgtgtacacgtgctttaggcctagaaaatactgctctgttgtttgttatctctgtcgggcgccctgaaggggcacctccactattcctaagctcctatacaaataccaaatggaagtggtcggttttggatctcggccgactcttcgctgagctcggcgacgcctgagctcggctggtccggatgagctatccggacaattcttcgaactcggctgagccggataaggtgtccggataagctggtgaactcggctgagctcggctgagctcggctaccggtacagtgtaccactccagccgagttggtcgcgcgaaatctggtgtttcctacaccacatgaatcctttggaaactcggccatcacgatcaattggtgcgggagccaccagttgaaccttgccgtagacgcgttcctaaaagtactcggcagaacggtgaacttcaggtcgaggctgggaatggagatctcgtttacacggagatacgaaagtgtacgcttcgcagtgggtttatgcccaaagtatgcaacgactagatgggagtcgattcatgacacgtgtcatttcctggccaagcactacgagcaactcgttgctgcacaagacgcgaagaactaggcgcggtcgagcagcgcatggtggctgtgtctatttgttgtgagcgagctgactgaggccatacgaatgtgttttcgtcagctgcaagttaagactgtcactatgaacgagcagtacaccgctctggatgagctcgtgaacacgttccagttgaagtacgagagcaacaccgaagacggctcagtgaatggggacaagaccaaagtggccaaccacctcaagtggtgctcgtacaattcgttggcgctatttaacagcatggacgtcggagtgcagagagacgagagtgccatagaagaccagacccacactgcgacggatggtaccgaactggacgacgcatcccccgacgagcaacctgatcaaaacgacgtcgactatgagatcgatcccgccccaccccaagaccctatgactcagactgaacttgttggagcggtagctgaggccatcaccgttttcatcgaacccgtgtcatgtatcaagctcgacatcaacagcgattgccgcgagtaacctcctacttctcctatcgagataatacagtgcacgcatcgcgccttccgtgcactgctggcagctcacagccccaaattgaagactcgattcggtgctacggcaacaaccgatatcttgaaccaaaggaaacaactggcgcactgctttaacaagaagtctgaatgtcgccgccggcttgaaagcccacgaaactcgtcgcgtgaagtgacactcgaggttgtctgggagaaggcggtctcgttcggcaactttgaactgctggccgagtttgctgttggactcgctagcattgcgccaggtacccacacagtggagggggacttcagcacgctgaagcgtacgatgagtccgcatcgcggccgactcagcaactacgcgatggaaggtgagttgcaatgtcgacaatactttgagctcatgagtttggcggacaagatgtccaggtaccaagcagctgcctagtgtgcgttcctctccaagccacactctagcgtaggccaccacgttcacattcttatgcattcttgtagcgcccctttctagctttcaatacacagcgaaacattactgatcgggctaccccttttaaagttcccaggagtaccccgtatatctaaaaaggggcatgatttgcaaaatgccccctccggacatgcctgcgaatttaacgccgtaatttacggcagctgtaactgagcagccaatcagagtgttcatctggaagcgaacccgttcgcggacagccagtcttttgattggtcaattcctcaactgactttgtcgaaatggctaacatgatggcccgcgccgtcgcgacggcgcgcggcgacacattgtccacgcagcagtgcgacctgctagcgccggagaatgaatacctgggtaaggtccattctcgcacctgtctcaccgccttttccccacctaaaacgctgctttcctgaccatttcacggcttatgaccattgccagacccgaacccagacctgcactcgctcttccaggtacagaccattcttcgatcgttaaactatggtagaatataatctgttttatgtttaaacctataggagtacaaccgcatgttcttcgaaggacgcctggcagggtgcgaagtcaagtggagcaagcgcatgacgctctggtacggtttaacatcgaaaataattagggtgctcagttattgatgcatacttccaggactaaccatttccattggtgttttgcagtgctggtctgtgcagctttcagccacgaagtgggttctgctccatccgattgaggtaagtttaaaaattattgggtctttaagttcgagttgctgctttgaattaactggatctgtgggtgttgatttttacttagtgaaccgctgctaaagcttcggccacgcagtgacctggtgaatactttgctggtacgatggaaaactgtgtggctgataagtgctagtatgttcttgctgacatgcttcgctgttcgaacagcacgagatgatccacgcgtacgtgttcgtggcgacgccggtgcgtgatcatgaagaccacgggccgttgtttcaggcgcacatgaatcggatcaatcaagcggccaaaacgcacatcactgtcttccacacgtttcacgacgaagtggattcgtatcgccagcacgtgtggcagtgcaatgtgggtgcagatattcaagcaatctttcggttttatggctactaacgttagtgttttgctcttgttgtataaatgaagggcgcatgccgcagcaagccgccatactttggtctggtgaagcggtcaatgaatcggtctcctggtccgactgatcgctggtgggcggaccatgaacgcagttgtggcgggagctacactaaaatcaaagagcccgcggaattcacagccaagcaagcaaagaagaaggagcgggagctggcacgagagcagaagcagaaaaagaaagacaaggagacgaaggcagcgcccagcgtcaaacagttcttcccaacgatcaaagatgatgctgaggctgatcaatcggaaaagccagcccgcgaatcgaagccaccgcgtacagggaaaaaggtgccacagcgaaatgaggctggcaacggcggtaacaaaaagcggaaggtcgagaagggaggcgatagcagcgcagaaccagcatggccgatgcttggttttccaacatcagctccagtgattttttctgcagatggagacgatgacggaaacttcctcgtgggtgacatccaagcgctgttacaaacacaaccaacctggccgctcaacaccatgagcgggagcggaacttcgggagaattgcacggcggcgaagccaccaatagagccactgccggaggagtttccactgtggtggatctaaccgtatctgacagtgaaaccagcgacaacgatgacaagggaggaattaatagctttccggtcacagtggtggctccagctacgtcggagtcgcggcagtcccaaaagacaaccgatcaagatattattgagattgactaacaaaatctcgcagttctgctcattatcgcctcatgtgtttttttgggcgatgccaaagggaactgaaacaagcaactctttaccgacgaattaatctgtctgaggctgtccgtacaactcttctagttgtcctcgctagataaagtatatttaccagtcgctgtgtccatcgacatgtagagaccgataaccgtattcgttgcggcagtccgttgtaaatgcctccatctcgaacgatatagcttgcatcgtgggtactaacgcactcgccttgacagctctgctcgcgtagattcttacgtgtaacttgcatgctggcgtcgctctatcaaacagcggtccgtggtactgtctccgacatcgatcgaagccgacgagttgactcctcgtgacgccaggccgtaaaagttctcttcaatcaaaccgtttgatgctgaatcaattaaacagcgcttcaagtctgatgaggcaagccggtcaagctgataacactggtgttatcggctcgaccgcctctggtttcgagttgcgggattacgggttgagtgcaagcgtcaatctgacgatgtagctgcgttgccgttcgccgtgcggctacggtaacctcagttcgcaatttacgcgaccgaatgacaagattaaggctacgcgaatcaatatcttcagatggataattgaccactctaagtgtattacaggataccccagagtagctcgtgctccacgccggacaaccagacatgcacttccccttcttatgtttggtattcttctcactacggaaaagcatgtgaatcagcacggactttagaggatgcagaacgaattgttctacgaaggtagacatcttccccacgtacgacgtctggcttgacgttttgtgagcgctcagtgcaaggaaaccttcattattcctaaatggtaacaaggctctctttttaaccgtacccattaattcacttgaatgctcccctgtagcatgcactgagtgaaaatgctgcggatgggtactgaacccctttaaggctgcttttgacagcgcttgtgctgcctgacgtctagaggagacggcgagaggaatccttgttccagaagaagagcgtcttcctgagccagctcgtgaagttattccaccagtcctcgcgacttgagtctcccgtggttatttctcctcgatcagcggcggagtcgaacagctcacgagttgcccgttgcgatatttttatgctgtcagcagactatgtgccaaatttcagctcaatctgagctctcgatcatggggcttgtcatctggggggtgggatgatcgcggcggcagcgtcatttgaatcggctacagcatcttccgcggcgattgtagcgataagagcaccgaacacaagaagatcgaagcgcatgagccgttgggggttgtttgacttattgttgaatgacggaagcaaccaaccattttctttgcgtcaagagctgtcaagcacgtttcacataaatctccaagatatggccgtcaaatttgtattaagagaatgcccgctcatgattgtgtttttctaacaacaaccatcctggaccaggactcctggttcatcgatcgaagcgatatcatttcatttttttctgcactatcaagttcgtcctgaacatactacatgtagtatttcaagtatgaaagtcgccacaaaaaatacttgtacagtggatcaactgctatactactactactacattgtaaattgacgtcactactccctacaaatacaagcagtaaaaggcgctagtatcgccgatttggcgagcatcttttctttttgacgtggtgacaacggtgttgggcttgtacttctgggcgccttctatcccaaactgtaaaacaatttcaaagaaggctcgttcctgagcttactttttcaatacgtataatctaaaaaatatacgtacaattacaaaaattaaagcttgacatcagaatgatacgatgctggctcaaatctgctcaaattccacccaaagagctttagcactgaatgttagacggctcgccagtgcagttaccgacgctcgaaactgcgacgtcgatgttagtgaacgtccggtctgatacgacgtccgggttcgccatgatgttgtacaggtttttagccgttcccttgagtccgtcgatcatgatctgtttcatcttaaccagactcgtgggtgtgcctgtgtaccctcccttgctcttgttgtagtccgagcgcatcacgatggcgttggtcacgttaaccagcgtgttggtggtgtagatggcgttggtgacggtttagagatcctggaggccgatgatggtcttgatgcggatgccgttggtactgttcacaatggtattccccgtgattgtgagccctccaccgtggtggaggcattcagcactgggccaccaagagagccgacggaaatgccatgagatccgctgcagtagttgtcgctgaagaggcgttccccagacaatcgaacccgtctgtgttcttggcgactccgtcaccggcgctggagttgagtgtgatgttgagcagtgaacggggtgtgaggaaggaggtaagttgagaactgatgtgcattgaggtgctggcggcttgccgccgccagctcgtccgttacctaggtgcctagagcacgaacctcactatgaactgggtcaacagcttctctgcgtccgtcgctcccgagttctcggtcgccactgccacgcctgtcgcctcgctgtctccttccacaccgctgcagcctccgctgccgtcttcttccgcactgctgcagcccgccgctgccgtctccttcagcacccagcagttcgcggctgctgtacctgttcgcacctagcagcctgtcgctgctgcctcgatccgcacttaaccgcctgtccgttgatgtagccatccacacttcaacactccttcccgggacgtcctcattcaagcgagaccagctctcgtagctagccgaggcgtggtgctaggattgacttggtgatgaggtcggcccgcatcttccgcgattcgcagtactccaccacgatgatgcccttctgaacgaaggctttcacgaatttcacccgaacatcaatgtgcttgcctttccagatgagtcctcctcctctaactgcttaatagcagcctggttgtccacatgcatgatgattgctcgtggacgacgaccccaagctcaccgagtagttcgctcagcccaagcagctcacttgcaacttgtgaggccgctacgaactcaacctccatggtcgagagtgcaacgctgctctgtttcttacaaaaccagccgaccaccataccatcgatgcatagcacccctccgctcacagacttgcgatcgacacggtcgcccgcgtaatcagcatcgctgtagccctcgagcctcacctcggccccctgcactgagctggcgtcaatctccaggcgcagcttgacgtcaatagtacccttcagataccgcatgatccttttggcgttccgccaatctgactctcgaggaacatgtgcacgccgggccacacggtgcacggcgaacacaatgtcgggccttgcgcaccgcgcaatccacagtaggctccccacaagtgactgaaagagttgaaccgtagggcgggacggtgtaccattcacatcgcccggtagcatagcgctgtcgtcgccttcgtccttgtcgtccacgactggtaccctcaccgcgttagcatcagcgagcccaaagcgctccaacaactccaggatcgcctggcgttgattcaacatgtagccatgcagttcatcgtacacgatgccagtacccagaaacttggacacacgccccaagtccttgacgtccaacaccttcatgtcttcgaagaacttgtccacattggcgacgctcgtgcccgtcacgagcaagtcgtccacgtatacccctacgaccgtaaggtccgagccgttgcccctcttgtacacacagctgtcggtgtagaactgctcgaagccgagcttcaacagcgtcttctgtaggtgcagagcccacaggcgacccgcctgcttcaggccgtacaagcttttgcgcagcctcagcgctatctgcctttcgttcgcaactcccaggtcagccagcgtctcactgttcaccgtcatgcctcgcggcacatgcaacaagatctccaggtccggctccttctcagctcgcacgtacgcgttgggtacatccccgtgcctggcaggcacgttatacttgcgcgacagcgcgagcacgatcctagcagagagaccctccagcgcggcgctaaacgtgtccacatagtccacaccatattcctgttcattgccgcaagcaacaagcctggccttgaacctttccagagtaccatcaacatgcttcttagttttgaacacccatttcgagtgtagcagctttgcgtgtcgtggtttcgccacgatttcccacgtgctgtttgcctccaacgcactaatcgcttcggccattgccttgctccaatcagcggcacggtcagagttcatcgcttcggtgtagttcttcgggtcctccgagaagcttgccatggcaactggcacatgcttgctccccatgttgcgcgttcgcatacgagttggttccgctggcggatggggaacatgttcttggtgctgcgcttccgcctcgggtgctccttccattgtctcattgccttcttttgacttcttgaccttcgacctcttgctgcgctttgacctctttttacccttgccgcgggcagccactctctccttccgacgaagagcctcctcccgttcctgcacagcacgaggtccactcggcgagctgcgcctgcaattgctcattgccgggcgcattcaacgtctccacattctgcacatgctgcgtcacgatgacgatgcggtcgtgcggcaggtacaccttgtagcctttagtctcatcgtcttttccgataatcatcccgacctcagctcgaggcttccacgccttcttgcctgggtcccggtacgccgtgcacgcgctcccgaacaccacaatatcggccaactgcggctgcacgcccgtcaacatctcgagaggtgacgctcggctcgggttcgcgctcgtcggagtcctattcaggatgtacgccgcatactgcactgcgtccccccagaaatgcaacgctagtccgcttgcgaagatcatgcacctcgccatgtttaggacagtcctgtgcatgcactcagcttttccattggaagcctgattcttggcctcacttacttgcctcaccactcccgttgactgacagaacagattcacgttgcggtactcgccacctccgtccgtacgcaagacgtgcaccttgcagttgactactgctcgaagtacaccaggaagcgctcgaacatcttagcggccaggtccttcctttttgccacgaacaccctgtagtagttggtgtggtggtccacgaaattgatcaggtacctgttgccgttgcgatccgtaggagtcattggtcccttgaggtcactacagatcacaccaccaatcctgtcgatcggcgcgttcttgcccgagtcctgcttggactgagcgttcttcgactgtttgcctttcgcgcatgtcaggcaattaatccgggccctgtcagtcagctcgatctcagatcccgatgcgtcggccatcctctcgaccgtgtcgaacatgaggtgcccgaggcgttcgtgcagctccatcaacgtgcacttcaccggtgcgcactgcagactgtccttctcagcttgcttgagcgtagcatacacttcgctgctcttatcgtcgcgcgggtccacattcactgtgtttcctgcgctcgccgcattcaccgtgttcacaaccaggacatcattcatcttctccacctcgaacacgcgagcgccatcagcaactctcgccaggtgccgacgctttcccttgtagaccaatacggagcccttttcttcgatcttgcagtacgacagcaagttctgcgcaagtcgttcaccgaagtacacattgcttaccacaacgtcgtgttcagtgccatcgcccgcggcacgaaccacgatgcgcccttcttggtcaccgacatggactggccgtcggcaaccttgcatgtctcgctacagtccacagggtcaatcaacaggctggcatccttcaccaggtggtgactagctccgctgtcaagcacccacgagctgctgttgctgttgcccacagcgagcgcgaacatcgccttgccttctttcttcttgcccgtgcagtctttcttcaggtggcccggttcgccgcagcgccagcagcgtcgctcgatgctttcgctgcctgcatccttgacagcattcgcgactagattaccgctgctactgttgccaccgtggccaccgctgcgactcccgcgaaagtttctgccgtgcgcatttcctccaccattcatatccgcctcgagcgtgctagcgaagtcctccagttcccacgcttgtcgtagatggtcggcgcgacgacggtcaatcctcgtttgcatcgccctcttgacgtcaggcgacgcacactcgcagatgtactgcagcacaaaacgatccgaacagtctgcagcactcgcgattgccagcaaatactgatattgctcagtccaggtacgatcagcacacttgcgcgctcgcatcatgcgagttgcttgctcaacagtgatctccttttcgtacacttctaacatccgatacatcaaatgctccagcgttggcgactccgccgaccaaattgtcttcatccggtcaaaaaacttgcgcgctgggccctcgaggtatcggttcaaagcacgagccttaaagtcctcgggtcagtcgccgccgctaatcacctgcgcggcgataagttcgtccaggaatctgagcccccaatctttaaagcctgcgccgaggccttcgtacatctccttgccagagaatctctcgatcggaagcttcatgtccttcaaggacgggatcttcaacccgaagcctcgcggaggcgcgaactgctgctgctgcagacgcgggtccggcgcgggtgcatgctgctggaacggcactggctgcggctgagcaggcgcaaactgttgctgctgcattcccgggctgatgcccattgcttcgctgagcgagtcggccctcactcgttgccgacgagttgccaggaattggctgaaggcgctcgagccggccgccgatgagttcgacacatacactccgtgctgcagctgagccttctccagccgatcgagtacgaatcctactaagtacgagtagctgccgagcgcagctccgtcgccgaaggcgaccccaccatacgatattgcggggccgcaggacccgccccggcctctgtagtactaatctaacattgagagtagtgcagcgagccgacgaggcgagcggaacgggtccgccactgccgtagcgaagcgtaggcagtctgctccaatagcgcagcgagcattgcgagcgaagcgccaactaacataaaattcaccgccgcgtagcggcggcgctcggctaatagcatcaagcttctaggagccattcacctagcaacatcagctcagacgcaccgcaacacttcagttctaaacaagcacaacaagtcgcacactctactgcacgcaatccgactctacaaaagccgacaaccttctcgctcccgctccgccgcaaccgaccttcaccaacaggcagattacgagcttttacttcaagccctgtctggacgctgaaggggacctaacgggttactactcgtgcaagtcttgcggcaagcgcaggaagcacacacccaggacgggttacaccaatctgtgtcccatgtccggactgatccccctagctacgagggcgacatgcgtggcgctagcgtggcggctacaggcactctgctcccatgggtgagtcagaaggcctctaaccgctacgcatggctccggtgggttgtgatgggaaacctcctctcgttttgcgactccaaggagactcgcgagtaagtacattgatttgttttggatactaaaattggttacaaatttgtctctaatactctgtattgctgattaggtacacgagactgaaccctatctcagtacagacgctgaccgcgatcatggaggctgtggtcaaaggggtggagcaagccatcggcgcagacatgcccgacagctttggtctggtcatcgacggttggtcgcacggcactgagcactaccttgtcgtgtacggctgctacgaaacggacgctacccgctgttgtcactggctccagtgatcgaggacgccgacgaccagatgaacgccgaaggtcacctcagggccatcaccaggtttttgcccttctttggccagtcgatgtccgtctgtaagttcttagtcggtgacaactgcgcagccaacaagcggctcgctaacttgattggtgtgccgctagttggctgcgcaagtcaccacctaaacttggcgttgcgtgactacctggcaccgttcgacagcgaactggaggaagtgcagcagctcatgcgcaagctgcgtacgctaacgcaggccgcgaagctaaggtaatttgggtatcctcattttgcttttttggtactggcctaattttgtgtttaaccaaatttttattttaggaccaaaacggagttgttgccagttctgcggcaggacacccgatgatcctctacgttcgccatgctcaagcgcttcttcaggcttcgcgagtttatttcggcggacgatgaagacctggccgactacctatcctcgcggaccgcacaccggaatctggcttcgctgctggacagcctgcgcgacgtggaatctgtttccaagcgtctgcaagctgacggactgacgctgctcgacgcgcgaaatctctgcgacggcctcatcgaaatccgaccttcatttgcgaagtatctgggtacgtacattaaatatgctgaggggttaatatgggaatgcggatttaacatgttggttatgtgttgtgtatcactgtttacatacaagcatcggatgctgaaattgtacactcgcctgatttcgagcaggcagtggtgaaggtgcttggcggccaggccgcactattgtcggaggaggaagagggggtcctagagccgttcaagcgccgttcatgcaacgtgtctatcgctcagccgcagccggaggcaacggaagggttcgccgagcgaattctcaagcgacgcaaagtgagagatgcccctgtggcacgctgttgggtgcaattccgcccacctcgaatatggtggaaaggctgtttagtgttactcgtgcggtgcttcgtcacgagcgtcaccgcctctcgccgatgatgctcgagatgatcctgtttttgaagataaatatcaccttctggaacgtcgctaccgtggagcagtgcctgtaggtagtgatcgctaaactgcagtaattcactgtgccatcttcttttacgccgttatttatttgctttactaccagcaacccaaagcattattcattagattcatcagacatcagtagatttttatgatattttcgggatgcctgccaatcttactgttaccggtcctggtacccttgacggcgtcaagggtaccaggaccagtaacagtaagattgtttcctgtcaggttaatcggcggccgcggccacaactaacgtagcagaggaagagttaggaacagtaagagggaaaatatatgagatatatgagaacgtgtgaattacctcggccccaaaggtggtggtgccctggaacttgatgttggcgttgtcttgcaactgagtgaaattcagcgtgacgccagcgggcactcggagcgagtcgacgatgatagtgtcgcattcactcacgtcggtgttgttggcgtagtctccagtgagagcgcacttgtcacgactctaccggagtaggagctcggtgatccttagttggcaaatttaagaatgaattgatgtactcgtgcgtcatgccctagctacagctaaactacttgaatgtgaatgatgtcggctgctagctggattcgcaccttgatcttcgacgtgagacttgtgaaacagattgcagccagaaagtagggagctgtcacactccgctccttaggaagtggcgtaggggcttgcgcgagacgcttgaagtcgtgttgtcggacgagtagatgctgcacgagcattgaatgcatcgatgagaccttgagcttggactaagttgctttcaggctcccaagaatcggcgttaccagcgccataccattacacgtgatattcgctgacgccgcgagcaactcggtgacctataattttgcttgacctggagcccgatacttccgtccctcgtgatcaattcgggcacacggtcgtcgcgcgtggcggagtcgtccggcgtgtacggccttagtcgagacacatgaaactcatcgtgaagctggagtccaccgagtttgtaggtgtctggcgtcgttacagcgagaaccgggtatggaccgacgtactttgcagctagagaccttttaccttcgcttccgatgtggtgaagagcgaggttggaggtatccaaaggcacttcgtcgcctacgtgataggtagcggtaggtcgattgcggtcatgatagaacttcatacgctgctgcgcttggttcaacgcatcttggcactccgtgaggatgacctgctgtgtttcgacgaaccgggaggtagtcttagggccatcgcggggtgggacttccaagtcgccgacggagcgcggtagaaagcccaaatctgccacgaatggagccatgccgatgctgtcatggacgcgcgagctgcaggcaaattcggcgagtgcgagaaattcatgccagtcggattgatgcgagttcacgtacgcccgcagataatcaccaagataccgattggtcatttctgtttgtccgtcggtcgatggtttgaaagcactgcttgggttcagcttggtgtcctgcagctccattagcttcttccacagcgtcgacgtgaattttgagtcgcggtcgcacacaatcgattcaggtagcccatgaagacgctggtactaatcacgaaaaagctttgccgtgtcctgggcggtggcggtcgattttgtggccacgaaatgtgctcgtttcgtcaggcggtctacgattaccataacagcgttgcacttgtgcagcttcgtgtcgggtagactggtgatgaagtccattgtgatatgcttccaccgaccttctgggatttttagcgggtgcagcaagcctgggtctttcctgcgcgacgtcttcgtgcgcatgcacatctcgcatgtgctgcaatacgagcgaactgcgctagccattaagggccagtaggatttatgctgcatgaaccgcaaagtcttcgaagttccgggatgccctcgcgccgccgagtcgtgctcttcgaacaggatactatcgcgaagttcgcggttgtcaatcgtagcgcttgggaccgatgagagcggaagtacagcacatcaccacgaagctcgtagctgtctaggcgagctgtcttgggtagattcgggtctgcggcagctgctgtattgtttgcttgagctcgtagctgggtcagtattggtccaaagtacgcgtcactaaggtacaaccgagaacagcgttctttgaatgcttggcgatggcgaggagcggcgctgctgcgcatacagatgtgtcggaattccagatgactcattctcgtctccgacgtgtttcaacaattctgcaagtgaaatgacggacgagtcgtgcttccagtcttggtttctggagatgaagtctgcaaccgtgttggtctcgcccttgacccactaaaaaggggctggaacatcccacgctcattaagccatcttgccagccgctgggaacacgttttctggcggaggatggactcgagcgtgcggtggtccgtcttgatcacaaatggcttgtcaatcaagtgcactttccaggttcgcatcgcaaagagggccgcgaggatatctttctcgcgcgtgggatactacagctcagcggagttaagcttacgacctccgtaggcaattacgcgttcgtgaccctctgatatagatacccgccaaccgcgaagtccgaagcatccatcgccacgcagaacgtgcggtcaaagtcacggtgagccagcactggtggactagagaatcgtcgcttgagctcagcaaagcagagccggtgttgctcgttgagttccacgcgctcgttccgcgatttacctacgagcaactctgtcagcggtgccgtgagctctgcgaagttctgacgatacttcaaaacgtagacacaggttccctaaaacgactgcagctcgtggtttgtgcgggggagcggccagtttcgaatcactttcgccttgtccggatccatgcgaataccatcagccccaatgaagtcgcccaagcacggtatctctcgagagcaaaatgtacatttggagaatttcacgtaaagatgcttctgcttgcaacgctccaacatcttctccagtgcagcgagatgttcttccatgctgtcaaactccgtgaaaacgaagagatagtcaaaataggctctgtaaaagtccttctgatcctcgaacaccttctgaatcaaacaattgaaagctgatggactgcatgagagtcccattggagtcacgagatattcgaacagcccgtcaggtgtggggaacgctgtgtagggaacaccctgctcaagcaaccgaacttggaagaagccccacatcagatccattgccgagaagatcttgcccttcctcatcgcgtcgtagatgccttccttacggggtacaggcgtcgctgggagtcggattttcgtgttgagtccgcgaaaatcatggacaatccgccagccaaccgctttctttacacagaaggtaggagcggaatagggcgattttgaccgacgaataatgcctgcatcgagcatttatttggtccatgcccggatcgcagccttcatgtcttcactgaggcgaaattgttttcgcgcgacggggacatcgtcttcgagcttgatctccgccacaatatcatcggtgcgcgttggaggcacggttggcaggtgggcgcgaaagacgacgcctttgtacttcagaagtagcgattctgcagggtgtccttgtagcgcgtcccagtcttgagcctgctgccgacctgctttctcactctcggagtcatgttggatcaggaaacaaaactcgttgtccttcgccttcagcagcttctttagatgcttggcggcaacaactcgagtcgggtcatggctagactcgtagtcctagtgcatgtagaagtgcagatgcgagtcatcgttgctggagggccgagggttgcgccggcggcgaccgccaactcgttttgcggggtcttgcctcgcgcacggtcgcaagtaacttccagagtgggcatttccacggaaggaaattgcgcgctccgaccaatttatgtccggtttcattccctcaagccatggccactggccatggccagccgagtagcacatcttttccctcgggcacacgtatcacataaacgcgagtttgataaggcagggaagccgtccatctcgagcgtgattgtagtttctcgacgagggatcttggcgcgacgattgttgccgatcttgaccgtcaaaggcttggggcacaatgtcacatccaggtttagtttttgtgcgaggtacggcgaaattgcatcgaatgacgacccgctatccacgaagcagcggacggagcgatccttgatccgggcttcgtgcgtcaagtagcagtatagtttgtcctagtgaaaagccagcgtctcatgttgtcttgcgctggtcttaccagaggtcgatggcgcagcggagggcctactgctgaagcctcccgctgtggtccgctcggtagggtggcaacctaccgatctggatcgtttttttgccgatccagacccacctgccgcgagatcacgggcctttttacggcactcttcctcgacgtgattcttcttgctgcagaatccgcacaccacctgcgagtcggctttcttgaagtccttgttggtcttcgcgttggtgctggaattgagcctggcggtttgttgtccttactcctttggaggaggccgcgtgtgtgcgggctttgcatcttcatagcgctgagccatctcggtggcttgttcgagcgtctcgggcatgttgcgggagatgtacgcgcccgcaaattttgctgaaaaaaaccagctattgacgacgtcaggaagctccgtgtcaacttgcgagagcaagtgcaggaagcgcgacgtgtactcctgctgagacttggtaggctttagctcgaacatcttcgacagggtcttctacttgaaatccttgtctctaaagcgagcacggatctgttccttgaacagcgcccatgttagcgcgttcgagcccatcgagagtttcaaatctcggaaccacgcttgagcatcaacgcccaggttagcgaataccatgcccaagaaagacgacgagaactcctgcatctcggtctgaaagtcggagtagtactgctctgtactaaagatccagagttccaggtcgtcgttgtcgttgccctcgaagcgcggcggatccgatttctttcgcgtcggcctggggcgagactgggcctgtaggatttgttgctggagttgagctgtctgcgcgagcagctgtcccatttgagttgtttgctgctgcgttgcttggagcgtgcattgaagcatctgcgccagcagttctggagtcacggttgccgtcgccgacgatgtcgatgccgcggagcccggctggcctggcgcgggctggcctggtgccgattgaggctgggcgtggctgctgggaggcacgtcccatctcgtaccctcggggttcgttctctggcgctggtgcgggcggtcgtcgggcgttcccgaatccattactggcggcagcgttcgcttaatagtaaattaactgtcacgaactctaccggagtaggagctcggtgatccttagttggcaaatttaagaatgaattgatgtgctcgtacgtattgtcctagccacagctaaactacttgaatgtgaatgatgttggctgctagctggattcgcaccttgatcttcgacgtgagacttgtgaaatgcagccagcaagtagggagctgacacagcacttgcccttgaagaccggaggagtttgctttttactatcggggttggcatgagcggaggatttttgggcgaattcggcgctagccgcgtctggctggccagcggtcatgaccacaccttgcttgtagttggaactggtatcgatacgggtccggcccgcagcgtttgccaccaggagggaaacggcaaggaaagcggaggaaatttgcaagtaaagttggtgatccgtacaactccaaaaaaaatgatgaactcatcggtcctgatggtctctaatagatttgagaagtagtaaaacgagtggttcagtgatacggttccgagccgtttcttcgccaacgcgagctgtgttttgagctaaacatgtcactagttctgtaatgaatctcatatggccctggtagcagtttggaaactaacatgaatatggtgacaacaacatggccaagtgagtttggctgaagaggatacatgagacggtttcaaacgaaacgatgcttacgaacctaagtacgaatcgcgatttaaccgcatcaattgaaagcggcgtgtcttatgcttcgtttaagctattgaaggctccaaaaggttaaaaactcgcggagtgacatcggtctagaaaaattatctccattttcgaaccccctaaattcccgattttttttgggcgtgtcacctcaatattttttcaattttaacgtatcgtatattatcggaaagctcgcgctaaaagcaatctaataagagtggttttacgctttttacgtgctcttttcactttggaaattttggtgtccgattatttccgaaaaataattggtcaacttcaaacgcgattatctcgaaaactctaaatggcgcataagcatcatttcgtttgaaaccgtctcaaatatggtcgacttcgatatactactcgacatgtcgattcatcacatatacaaagctttacccgaaatttttttgttataaagatacatatgttatctttggatcctatcttgaaccgctactcaagatactaccgtcttccctcgtactagacgcctaggcgttctaaaaaaatagaacgcctagtgggcgttctatttgaataaaaggcctaggcgttatattcaagtgaaactacgaaactctgaaggatgcaaaaggtaggcgttgtattcaagtaaatctaaaatccctgaaggttggtagtggcttctaaggcgcccagctgctcaacccatttctgaactatcgacggcgagggtatcttgagttttgcggcaagggcggcaaacccaaagccgtcgacacccttcttgtactctccagcaacactgcacttgaatccgatactgtagctattacgctttttcttggctgacattcttggcgtgggcttttgtgtcgcgggagggcgattgtataatgatacgacaaaacaagagctcgacttccgctcgtatggctggcggtcggcacagaggtgctacctcgtccaaatggcagcagaattgttggcaactactatcgttaataagagttgtgttacgcttgggtaggcgttctattttgctgtagcttcaattcgagggtgcgatcagattcgggattgttgaccaacctcgaatacaacgcctagccatctagtacgagggaaaacggtagtaatggtgtagcttgtcttgtcacgtgcttgcattggtattatataacgacgctactacgtacaactagccgagcgccgccgctacgcggcggtgaattttttgttagttggcgcttcgctcgcaatgctcgctgcgctattggagctcaatgttagattagtactacagaggccggggcgggtcctgcggccccgcaatatcgtatggtggggtcgccttcgctgcgctcggcagctactcgtacttagtgtaattcgtacttagtgaataagcgtgacgatttctgtgaccgacggacagcgatgctctgattgattcttaggatacatgtataatactagtagtattataataacatggatcaaacatatactgtaccggaatgtactctctgtactattctatcacgttttaacataacaaaatagcgagtaagcgaaaataatacactgtaagtacttgacttgcactacgaaactgttgtcgttacttctaacaacgttgccaccacgcctataccacgaattgaacctcgtaaactgttggacttcaccgcggaccagggggaaacggagtcggttcttttgaggatggcacagcaataaaaaatgttgtggtgctcttattgtcgcgagactcagtggtggtatcccatcaactcggttagaagacgacgacggtaacaggaacacgatcgtctctactgtagtatgacgcgaaaacacagaaacacaacagaaccaaacgatctgtgggtagtaagtagcacaagagttacgcttccaagccattagttagagcccgtacaaagtctcctcaatcttgtcccacttagtcgaagacgtccgcatcttctcgacagcctcagcgagtcgatggcgacggatcatcgcctcagtggacacttgttgtcgagcttgcagcagcgcttgcttccgctccttcactgctctagaccgggcgtctgcggatgaaattcgccgtatcaactgctgacgggcgtattcctccatgcgctggatgcgcgcaacgttctcctctttttgtgtcatctccaattggtgctcaacctgtgctagcaaccgtgtcttctccctctcctgctgtgtaatttccatcttcatctcaagttgatcgcgttttgcgagtaattcgctcacgtgcttctgccgcagcgcatgagccgcttcgagtcgcttctggcgaacctgctcgtcctgtttcgacttggctgcgcgctccttgagatcgttcagcgccttcttctggatctcacgcgcgcgatcggctgccgctacttgtttatccgtcacctcttgcttcttacgcgcgatggccaactcgttctggtaggtgacgtgctgaatccgagcgttcgccttttcacgccgatccaaagcttcttgatgccgccgcttgcttgcgttctccatcttctgggccacccgtcgctccttctccaacattcttctcctgtttgcagcgaccacctcttcttgttgtcgtaatagttcatcagtgtgagctctccacgcatcggcattctgctggcgctcgagatcacgctgcgccgtctccagagaacgtagtcgagctttctccttcgcttcctcagctaataaccgctcgcgttcggcttcagctcgtcgtttagctttacgttcgagcgcctccttgtcctcgtcacgcttcttggtgatctcgttctcgtgcttcgctgctgcgagctgcattcgacgtatccgctgcttacgctgctgatcttcttgtcgtttggcctcctccgcagctcgacgagccttctcctgctggagtcgagcgagcttggcctccatctcaatcgcgctttgaatatccttctgctggcggagcttgattcgcgccagtcttcgctcttctagctgtagcaaggtcgagtcgcccaaaacgccgggacttccgtcagagcccgaaggcacgtgcttccagggccgcgcagactgaactcgtcgaggagggaaacctggggcaacttgcagctgtagcgcggggctatttggcacacccgtgggtgattgagcattccccgacacggaaatcaacgccgtggaaggtggtgctggtcccaatccgttgatgatcgcttcacgctccgctcgaatcgtctcgagcttctgctggcggagctgctcgaaatgctcgtgacgcagcacggctgcctccttctccaccaacgaatactttcggttcacgccttgctccaggaactcgaccaccgtcttgggcagcagttcgcttggtttgatgcccatccgtcgacatgcttccagactgcgcggcgagttcatacgggctcctgtagctgcgcagtccagcaccgtcacattgtgctgcccgccttcacgcacaggcgagccccacccagtctccgcggacccttgcatcacgacgacagaatagcactcgcaatgtccggaacgaggctcggcgctataaagagcttctgctgtctaggaatagtcgagtgtcatcacgcttggcatggttgtcagaagtgttgtcatatctattcctttagcacgaactcgctggttgtacctactctagttgcgcttcttcttgccgcgacgctcgcggcccttctgcgcgttggggttcatgcggccgtagcccaccacgatacctgtctgtcgctcggccttgacgccgaggtcgtgtgctacgttctcgccgaacgcgctctgcatgaccttcttgtgctggcgctgacgctggccccagatgccgaccagaagctggtcctcacgcagcagcaggtcgccgttgcggccgcccttcggcttggggagcgagaatttggtgcccgacagcttggtggggcggttcgcccgtgtgtagaaggtcatgtggccgtcgcggtcgaggctgtacgacacgcgctccatggtgctgttgccgcacttggggcagaacaggcggtccatctccgtggacgtcgtgaagcacgcgatgcagcgcaggatccactgcttgacgcgcttgatgatcatgccctcggtcgacagcaggcgcaggccgatctgcagcatcacgttctgcatggagaaatccgtggtgatgcacgccacaggcagacgcgacgcgatctcctccaggcccttgccgtcgccgaacggagacgccgtgaacttggcaaagttgtcgttggtgatccagttcttgccgtcgtcctccgcggcgccggcgttgctcgaggcggcgaacccgcccatgatacgggacttgacgtcggcgttacggatctcctcgctgatgacctgctccaccacgggctcctgcgtctcctcggcgggggtctcctcggcctcctccgttttctcgtggatgaaggagcagtcgtcgccgtacttgcagcccaggggcgtgttgaagaagcggcacgggatgtcgaccttcttcttggggggctcctctccaccctccacggccttgacggcggcctcgtcgtgcgtgaagcggcactcgtcgccgtacttgcagcccatggctgtgccgaagtacttgcacgggatgttggtctgcgagccgcccacgatcttgccgttggccgcgcgcgtgaccgtctgcgagagctcggggctcgtgcgcaggtggtcggcgccgttggcctcgacctccagctggtaggacagcgccatgacgcgcaggtccgtgagcgacaggtacgtgaagtcgccggtcttgcgcgagaagttgaccacggccttcatggcctcggccgacggctcgcgcgtctgcagcgtgaacggcagccgctccaggatggcgcgcgacttcttgtcgcggatctcgtccagcacatcgggcacggtccagaagttctgcacaataacaacataaatcgtggcttttagcggcaactcgaggctaattctttacagtggagtgcaattgcagcgcgccgtacctcggccagcaccgccaggttggtgcccttgatgatggcgccagagtcgatgaccaggtgcagcaccttcttgttggtcgtcttggccggcgcgggagccgcgggggcggccgcagccgccgcgtaagagaaggcgggcttggcgtcgctcagctgcgcggcctccagcgccgcggaaacctgctgcacttgctcctggtccgccatggttccgtccgagttgatgggcttcgagtgtggcgtttagagctccgatgccaaccaaagttttccgccaatggggagggagcccggttttgcgccaatccgcgaattgaaggtatcggccaatgagagggcgcatggacaggatctcgacgaccaacgcacatgggggcatcgcagttgtttcacccgttctttgccatacaaaaagtgacacccgggcgccgcttgaagcccagttggtcgtgccggaccgggacctcttccgatcccatacggaacacaagtgaaagatcgcaaccaaaagcttccgagatctagcaccatggcgcacgtcttcggcgacaacgagaaggagtcggacttcggctacgtgtacaaggtctcgggtccccgtacgtgcccgccattgccacctccccctgcgcctgctgcctcctgctaagaataacaatggaattaattgctttgaattgccccgcagtggtgatcgccgagaacatgcacggcgccgccatgtacgagctggtacggaggcacaaactgcgttgactgcgtctgcgtagcgttgctttagcgctgggaattgacggcgtgcgatgcaatttgcaggtgcgcgtgggccacgacaagctcgtgggcgagatcatcaagctggagaacacgaacgcgtccatccaggtgtacgaggacacgtccggcctgacggtgggcgaccccgtggagcgccgcaagcagccgctgtccgtggagctcgggccgggcatcgtggacaacatcttcgacggcatccagcgcccgctgcacgccatcagcgacctggccaaggacgtgtacatcccgcgcggcgtggacgtggcgtcgctgaacgccgacaagaagtggcgctacaagcccgtcaacttccgcgagggcgaccccatctcgggcggcgacatcttcggcctcgtgcacgagaacgacatcctgcactcgcacaagatcatgtgcccgcccaacgtcttcggcaccgtggtcaagatctacggcgccggcaccgacaacaacgagtccttcacgctcagggacacggtgctcgaggtgcgcgacgacaccacgggcgtcacacacaagctcggcctctcgcacatgtggcccgtgcgcaagccgcgccccgtggccgagaagctggctggcaacgtcgcgctgaccacgggccagcgcattatcgacgcgctgttcccgtccgtgctgggcggaacgtgcgccgtgcccggcgccttcggatgcggcaagacggtcatctcgcaggctctgtccaagcactccaactcggacgccatcgtgtacgtgggctgcggcgagcgcggtaacgagatggccgaggtgctgaacgacttccccgagctcacgatgacgatcaacgaccgcgaggtgcccattatgaagcgtacgacgctggtggccaacaccagtaacatgcccgtggccgcccgtgaggcctccatctacacgggtatcacgctggccgagtacttccgtgaccagggcatgaacgtgtccatgatggccgactccacgagtcgttgggccgaggctctgcgtgaaatctcgggtcgtctgggtgagatgcctgctgatagcggctaccccgcctacctgggcgctcgtctggccgccttctacgagcgtgccggtcgcgtggcgtgtctcggtagccccaagcgtgagggcagtgtgactgtcgtgggcgccgtgtcaccccccggtggtgacttctcggaccccgtgacggccgccactctgagtatcgtgcaggtcttctggggtctggacaagaagctggcccagcgcaagcacttcccgtccgtcaactggctcatcagctacaccaagtacatgcgcgtgctggagccgttcttcaacaagatcgacccggagtactcgacgctgcgcaccaagtgccaggagatcctgcagaaggaggacaacctgacggagatcgtgcagctggtgggcaaggagtcgctatctgaggaccagaaggtgatcatggaggtggccaagatcatccgcgaggacttcctgcagcagaacgccttctcggactacgacttcacgtgtccgctggtcaagagcgtgggcatgctgcgctccatcatcctcttctacaatctgagccagaaggccatcgccgactcgccgcccgacgccaaggtcacgtgggcgcagatcaagacgtctatgaaccccgtgctgcagaagatcatccagaccaagttccagctgcctaagcagcccgaggccgagctcaaggccttcttcagcggcctggacgaggaggtggagcaggccttccagacgctctcggactaaaggtgtcgcatggagaaagagaatgagttgactgttgagactgataacaggttttagtgtgcatgtgcctacaattcattcaaccacacaaaacgctatttctgggtgcctgtggctcgcaaagctcactttctggctcattactcgtctttggattcatgcaggcgcgtctggatgagtcacaactcaatccatcgaccaggccggatgacttcatcggggatcgttgccagcgtggccaggtcgtccttgatatttgcccgtcgtaccacagttctcggtaatcctgaactcctcggatattgaagctgatcctgctgacgcgttgagcgccgcattgcgcatcactgcgtgtttggtgtctttcgtccaaggatgccctctcggatcacacggcggaaactcaattgctcgggcacctcggaactcctggaacatggcaaacttgtagttttcgaggagggaagtgctgaccctagtcaacacatttgtagaaacgcctaagcttagtaaaaatacgagttagtgcaacaaaacgaaaacacaaaaggcatactaacttaccgttcgtacacagcatccaatcgctcggcacgggcgggttctcgcaccgcatgcccttggtcagcttggtaaaagtatttatgcagccttcgactgcctcctgtacccgacgatcggtgctcttctgtaaatctgaaaacaggatgagtgcctggtagtgcatacatgtaccgtcccgaccacccatcttcttcttgtcataaaccaacgtgtatcgcggcagtccgaccgacatgcgcacagcagtacagaggtcgtggcgctggaggacgatgtcaacgttgacccagaaccgcttggcatctctctgcgcgcgcacgggcccctcgtagttgaccgtagccccgccctcgacgacgagaagaggaaaaccaaacctttccactagcttctgcttcccgatatgcttgccaaaagcatagtagatgcttgtaattctctgcagagtcaccagcaccttgccattttgcgcgcgaacatgctcatctatgaaagcgcgaagctcggggacgagttctcttagcgcgggtagtggcttcaggagtcgcatctgcgggttcaggacccgtgtcgaagtccactgcacactcactttgccgctcggcgtcgggttgagtcattgacacatcaagcgtcattggcggggcccacacgggcgacgacggagcattgagcgcggacggcaaagtcgacatgggcgtcacggacagaggcgcgtcggcaacggtcagggcatcggtggactccctgggcgcatcgcccggctcgatagcaggcagcaaaccaggagccgaggcgaacggcgggggcggcattgctggcagatcggaaggaagtggcgacgggaggcgaggcggccgcggggcttcctcactttccctcgcgcgcttccgtggcattgtgcaagaagctaaatggccacgcgtgggcctggtggcagccaaaggtacattgcgcggacctggtgtcaccaaaggtgcaagttgaagtcgtctgtgtacgtaaatctgtgcgccacacggacttaaatgtagccacattgcggggataaattatcgagctcttttgattggataaaaacaggttttcggttcgcttgtttatgattggtcgagtcccgtcgcagctcattcgccataatcccgctggtcgcgtctgattggcccgctacgtggccctatttagtaagagccacattcgaccttcttctccctgctgcacgtcggcacggctgggctgagctgagaccatgggcaacaaaccctcctcggagcacccgggagacgcgccgatccccacgcgcctggcgcccaagtacccgcgcaggaagagcggcaccaccacgtacgtccctcttttacagtaggcaggaaggtcgttagtcactgatccgttgttgccacttcgcagcaatagccggacgtcgcagccgacggccagcgagcagcgcgccgccccgcctcagcaggagcagtctcagtctcagcagcagcctcagccgcccccgtccccgtccagctccacggcctccacccccacggaggaccagatcatctccaactggaagctcttcaacgacctcgagaaccgagaggaggccgaagtggtgcgttgagagtggaggacgcaagctctagattgtatgggggtcggtgctcatctttgtgtattgatttgctctgtgcagctggagctgtcgctgttcctggacgcactggtgaactacatccccgggctggacgatggcaagccgaggccggagccgcaccccgtgtcccagcaggagatgggcaacatcgacatcgccaacatgtacgtgcagggggacgagctggacgaggtcatcacgcgcaagaacgtgacggacctgatcgactcgtgccgcaacggccgcaagatcccgcgcaacgtcgtcgtgcgcgtcatcaacgaggccatcgcgctgttccgcaaggacccgaccatggtcgagttcaagatcgcgccggccaaccacatcaccattatcggagacctgcacggccagctggacgacttgctgctcattctccgggagaacgggctgccgtcggacaccaacccgtacctgttcaacggagactttgtggaccgcggcgaccgtggtgtggagatcgccatcatcatctacctcttcaagctgctgtacccgcgccacgtccttctgaaccgcggcaaccacgaggagaactccatcacccaagtgttcggcttcatgaaggagtgcgaggtcaagtacgaccgattcgtgtacgacctcttctgcgagagcttccgccacctgcccctggccacgctcatcgatgaccgcgtgctggtggtgcacggcggcgtgcctcgagagaacattctggtgagggacttcaacacgctggacagggctgggtacgacctgacgcggtatcgtaccaagcccaagaaccggaaagagcgcgagccgcaccgcaagatgcaaatcatccgcgacttgctgtggagcgacccgcgggccagcaagggctacgaggagaacaaacgtggcgctggcacggtttacggcccagacgtggtacagaagtttatgaccaagaacaagctcgcgctggtcgttcgatcgcacgaatgcgttcctcgcggattcgactggccgtacaaggagaagggcatgctggtcacgctgttctcggcgtctaactactgcggcaaggcaaacaacctgggctgcttcatgcgcgttccatcaggcaaggacaagcccgccttcttccagtacatggccaacgccgagagtcgcgacatggccgtgtccaacctggacgcactcttctcgctcattgtccagtaccgctccgaccttctcgaggagtttgaaaacgaagacaaagagaagaccggcaagctcacagttcagacgtggggtaacgttatggaggacgtgctggacctgtcgttggagtggaaggcccttcaaccactgctgaccgcgctggacgaggaaggtttggtgccgtacaacgacttcttggaccgatacaacgcggagggtgcactgaagcgtgctgagagcggagagagcaacgaccctgagcgcgagaagcagcgcagcgccttcaactcgctgtacaggcaccgctctcgtctcgaggcgctcttccgtgtgctggaccgcgacggcaacggcaccatctccgtggacgagctggaaaacggcatcaagctgctgaacgagcacttgccttctggaacgaagcccttcagtaccaacggagcggactacatgcgcatgatggacttcagccacgacaacgagatcaacatcaacgagttcatggaaggcttccgcatcaacgccaagctcaccgtccacgccaagtggaaacgcgcccgcaagaaaatcaaggcgctcagtgcaatcggtgcgttgcgcgcgttctcactccccagtcacgccactgcaggtgcttcaggtgggtcaggtggagaagctgcggtcgaggagggtgacgaatcagcggaagcagtcgacgttgacctcaactcgccagtgtccgatcccgagcttatgaccgtcccgcacgcaactgcgcctccggtgtttaccaggcatggcagcgtgcagatcatctctccgagcgctgcagtgaccactccaacggatgtgagcgagattgcagttgaccttgaggtcgtcgaggaaagcaaataggcacataaattcatcggagtcggtactgtatgccatgttcatgaagtgtacagttggtgttagctttcccctatggtctttgttatgctgtaagcccagtgaggcctgttgactcatccgagggcgcaagtgcggattgagctgcgattgatgctctggctctcgattacaagccaaaagtttacaatacccaaggtaagggcatagtggatcggttggtgggccgaatctgggcagtttctgaaagcaatccaagacagacgacattttcccgcctcaccgcaccatgcgattcaacctcgttgtgttcgctcttgttatcgctacgatcgtcgcagtgagcaacagtgttacagctgcatcgaatgacgctgtcccgacggccatttcaccaatggcagttcgtgaactaagcaagttcaccgcggatcaggaagaacgggccgggttcacgccgggggaagcagatcaccgagagtggtagcccaatttcaaggagtggttcaaggggtggttcaagagaacgtttaccatctggaagcgtcaccacagggattcaactcgccggcttcgatgagcacgagcgctaccaaggactactgttgcctcatttacaggatgagtattcgttttaaagctttaaaaagcgtgctcgaatcggattgttttttttttcttttttttttctctctttcagtttagcatgaggcggtgatgtaaggcatatcattcattaaagctagtaaactgcttacgtacttggacccggatacgattatgggtcagcccaccaacggtaatccgagttgtcgaacacgtttgcttgaacagagtaatcaagcagccagtacatgtagtgtagtcatccgacttggcttatactaaggacagaatccctctcagccagaacagcctcggtactagtagtatgtattcagaagttgtgcttcacgacgcgcgcgataacgtaaaaacggattgccacaacagccggtagccattccattcagttgattgcaacttgtaactggggaatttctggtcctggcgagaaataaagctcattctccgtagccgcttctcaattcgctgtacccacgtgaagaaatagcaccatgcgcttcgaactccaagcaaaacaaacgtttagggcatcgctgtcgtcgcaactgtatttttcattccaaggctccgatatccaagatcgagtcgtagtcagtcgactattgattcgatcatccgagagacccggagacgaaaacgagaccggcagcctcgaatcgtgcaaatgtaaaaggtataataaccttcgcttcacctccatgctctgtacaacggttgagcatgtcgacacttcatgcagatctatgaacagcatgcgctataacgtaaaatcggattgcgaggacagccgctcatctttcagttggctgcaaattgcaaccagaacatttctgctcctgtcaggagtcgagacccgctcactgcgagtcactttttaatttgcagtgccatccatccagaccaagtacttgcgtgatagtagtgcagtagtaccatgcgcttcgacctcttcgtgctcggtgctcttgtcactgcgatcgccgcagtcgaaacggtcgccgctaatcctaagtatcaatcagaacgacgcgctgtccgtgtgtagatcacgtgaattcctattggctaaaactccacccggcacccgcgtgcgttctaccggtagcgggccgcagggcccgccctacaagtaaaaaacacggcgagtagtgcagcgagccgacgaggcgagcggaacgggggcgattacgtcacccccgccgtgacgcttggcctaatataatatttatcggaacacctgctattaattaaaatgggcccaccgcgtagtagcagcgatagcagagtccgcttaaacatatagtagcactgcgagtagtgcatagtggcagtgatagctgggcttgccctactacatagtataattttatttcagcgaacttggttaaatataagcacattgtaagccatagcagcgcatagttagctatagcagcgcgtagtcagcgatatgaacgtatagttagcgatagcagcatgtagaaaacgattgcaacggatacttagcgatagcagcgcatagtaaatgatagtaaatgatagcagcgtatagtaagcgatagaagcgcatagaaggcgatagcaccgacgtaataagcgatagcagtgcgagtacatgtagcgagaggtacagtagctgaagacgattgattaatagtttcaggttagtttttgtgtaatactttagggacggatatattatagctgcagcggtgctgagtgctcatctataaaggcatgtagctacattggcttaaacgtgtggcatgtatctgtaacttttagtatttagcggtaagataatgggttctggggatagtagatgcctagacatgcattggagtggaggttttattgtagttcatagccgtgtgcagtaagagattacatgtagcggaaggagatttattactaacatgcgcagtatacttttactgtaatactttagcggtggatatattatagctacagcggcactctgcgttcatcgtgggggaatatttgcttaagcgcgtttcgtatttactaaagtacagtgtgcagcggtaggataatgcgttagtggggttctgctatgcagcgaacattagcattttagcgtttacagtaactaagatattaaaagtaacaaccttgcaccgcgtaactataaaattcacgtttacactatactaattccgtttcctacatgtatatccgcccaataacatggttattgaaggaatctcagcgtaaactatgataaaaaccttccgctcagtgaatgtcagaattcatgtatccacgagaataaactgatagccacgtctaaatatatgacttttgaagcagaccacgcacccagctacatttgacggatcatacacaatgctgaaacgatgaagcatgatattttaaataagaacacgaacagttattatatgttaagtcggggaaaagcgaagtcaacactttgattgtcgctggggcttatagcccaatacaaaaagtaaatgtatacaaactgaataacagagaactatggtacgatgatatactgaacagcaaatatgtacatatacgtgagcacactaaagataacaacaccagatcgatctaccccgccatgatatattgctcatgtttatttctactgcattcactgtaaacacggattgttagatatgtaccgtgcgaatactttgtagttcgggttaaatagccgcgacgagttggacatggctttcccgtacaagatagggccgtacaatagagaatattttaccctgcaacatccatctactcatagtaatgctggcacgggaatagttattttggctgataccatccacgactacactaagcataaaaacatttttacacgcacacaatcggaaataaatatcatttgaactgataaaagcccaccggatcgaagcggccctatctactgcaactaaccacataactaccgccgcgtagcggcggcgctcggctagtcctaagaatcaatcagagtgtcgctgtccgtctgagagtagatcacacttattcactaagtacgaatttcactaagtacgatttgctgccgagcgcagcgaaggcgactccgtcgccgaaggcgaccccctcatacgatattgcggggccgcagaacccgccccagcctctgtagtactaacctgacattgagagtagtgcagcgagccgacgaggcgagcggaacgggtccgccactgccgtagcgaagcgtaggcagcctgctccaatagcggagcgagcatagcgagcgaagcgccaactaactaagaattaccgccgcgtagcggcggcactcggctagtccgagcaacgctgtcacgacgacgatctcccaagtgacaacccgagagctcttcactccgggccaggaagagagaggcagaaacttcccgaagcggatcacaaggtctggtggccgaatttcaaggactggttcaagaagtggttcaagaggacgtttctcttctggcagcatcacaagaaagactccactcgccgtcttcgatagcctgccatatcgtcggatgcgtgatgaacagccaagtacactcgtgccataccgtgcaggttcggacggctcggacattcggacaacctttaaaactaaatgctattaaatgctccgtgaagtgtggtgcacataaaatcttttgcaatcctctgtcatacagcggctgtttagtggacaacggcttggggactgcggccaacagcatcagcagcagcagcagcaagacgtgcgggatgtcggcgccgtgcgggacggcggatcgtactgcggctggtcctcgggcggggtggcggccgtcgaggccagcagcagcagcgggctgaggaggacgaggaggtggtggagttggcggccaacagcggggtcgacgacatgagagggatgcctacggcggacacctactgtgacactcacttcatgtatgtagataacgagatgggtgaatgaatctatgtatgatgtaactatgtgttgggacctaacactggatcgcgactacaattacgttgtgctgggattgttgtagggctcaagaacatgcaccggtgcatcttcaagagccttgccttcctgctgaagtcgctggtaattcctgatgcggtcgtctagcttgccttgagcatacatccgcttcaaaaccttaacaattgtgccatgcgactttgctttcacgttctcagcctccaggaaagcaagaacgttttcctcggcctcccgtcctgagctcaggatgcgtccctttgctgtgacctcatctccggtcacgttgtatccggctgggagaaaaacccgcataaaggccacggccaccttgcactcgtgatagcgccgccggtttggacgcgcgcttggcaacgggggcagaaaccactcgtaccacacagtcgcgagtggcttcgcacgcgaatgcgcacgagttgccacgccgcttgcagtatccgacaaagcgctggacgagctcgacaggctaccagctgctgttgtcgacggagcggtggttacgtccaatgggtgctcaagccgctgcacccgctggttcaatgccttcacttcggctgctagccctccaaggatctgcgcctgctgctccaagagcaaggtttgcctccgcaagagttcgtcgtcttcaacacgccgtggtgccggactgcgtggagtgtcgttcttggacggctgtaaggtacgatgaatagccattgactatacagcaatttcagcctctgtcgcctgtacctgacttagtgcttcttcaacccgtttgatgtacagtgactctggcctaagccgaagcatgtcggggtagtggagaatggcggtggcggtaagtacgtccactacatcatctcgcaagctgagtgaaccccttcgcagccgagaaaagccggtcttgaagtaggcgaattcgatgcagaaccagagggtcgaagtcgtccagtgtaggtagccgcggactagcttttaaatcccatccagctaacgacttgccgacggtttgatcttcctgcgtcgtgccaacaatataattgaacgctttgctcacagcactcatgctccagcctccacggtctagaatccaaggtgtgctgattttgctgtcactattcgcgttttgagcagctccacgccgaaatgaatgcgatgatagccctggcgtcaggttagtaccttcggtttggcagacactactcctcttctgcagtacgcgattaacatacgcgtgaattccgggggctgtcgcttttttcgaaggtgcttttggggtcggcgactcagagttggaggttgctggggacctggtacgcgcatcaagtagttcgcggagcggcgtttcgccaatttcagtcggcaggagctcttgtgtatcccgaggaagttgatccatgagaaactcgcttggagtcgactgcataattgtagccaaagctagtgcgtgaattgggcaagacgaaaaatcgtttgggtcgtgaaaaaatcgacgctccttgatacgaggcagacttcatgcgcttaaaggtgataaatagacacccacctgtgtaccacgattaaaaatacacaaggtcaaaaccaaattaggaaaaataaaaagacaagtacttaccagggtaatcagcgacctggtttttcacgagacacatagtgtctgaagaccgacccagcaaataccaaagaatgttgagaagggctgcatcctggtagtcctgcacagatacagcccccttcaatatcgctaagctgagcgagcgcaggtcgcttttcgtgcacggtggggactggtgcgtaaagtctgtgcctcgcttggagcagtacttgtcgaggattgacgcaatcttttgcagccgacgacccgatacagcacttaaagctggaaacagctcaagtaggtggttcttgacgttgccaaagtagctggtgaccgagttctaggatagcagcgagcccttcgagctttctttaaatgctaaatacactgcaaatttgtcgagaacaatgtagagagtatcaccagttgaatccccacctacaaactcatagatggcgttgacggtgaagccctcggcgaccgcgaagcgctcgaaggcgttgagagccgtcgagcgagcccgctgggagttcccaggtatgagcgctttcgtcgacatgagtcgtttcttgagtggttatgctgcctcgtctgtctggcgccctcaaaattaatatgtgtccgaatattgacgatattttcagaatatttgacttactgactttaactatagaaatatcaaatatgtttcagatgttcggacaaaatatgtccgaattgtccgatttgttacttacggcacagcatgagatttgaggcacgccgattggctcacaaagtatgcgaaagtcttctgataggccaagtgccagtgttctattgtaatacgaaaatctagatgtctgaacggacacgatattctaccgtatcgaaaacatagtttttttttcacaggtagtttttcatgcctattttttcgaccaatcgtcgtccgttacagccgcacattttgctattagaccattatcggagaccacgcagacatgtcctcggacgatgtgtctgcgcggctaccaagcgcagtatgcatgcccaaggtggtgcgggacttgttgtggacggtgacgagtccgcatatgctcagcggggaccggttccctgtcctaccgccggaattcggagtggaggccttggaatgcgacgtggtcattgactggctgaacagcctcatagaggacccagcgccgttgttggcgttcatgcaaggtaaaccgcaacgcttaactgtgcgtatcatgatcattgagctaactgaagcaacgctttggtcggggttgggtctgcagaaacgacgtcgaccggtcgatcgttggctctgggcgtctacttctccactttgctcgagttctggctgcgcttctgtccgcatctgggaatggagaagatggagatcgggaagcagattgtgtcgtccaccaacaggacggtggggcagctgaagttcctctttcggtgcaaatttacttcaatggaggagtaccgagactttcacgtcgagtcgtcggtcaagttcttcctactcaacccgatcgacagcaacagcaatggctttattgaaactaccagtgaagatagcagtccaaccgaacgggatagttacgtaccgctcgaacagtttgtcgggccgcatcttggcgaaaatttggcttggagagtccaagaagtggaacgaaagctggcgatgcgtcgaggtgagagcgtgcgcgcgtggctggaggagaactacagcgacagtgtacagtcgcacatcgtgctgcgtgggtatctgtttcaacctctgcaccattttgactcgacttcggagacgacaatcgctcacgactggcgcttccatcagaaccctgccaaattgacacacgaagcgaatgggttcacaatgaacacgtcgtcgaatccaagcattgcaactgatcatttacgagggtggtggacgaccgcaatggagacggatttgcctgccaaagttcgagcgaatggcctgcgaggactaggcgagagccgattcgtgatcctgccgaagctgcattggttatcgccagtagttgccgtgcaaaacaagctgagcggccaggtgtacgtcgagggagacaatcggttggatatccccgaagtggaagcgctcacgcttgatgaattgatggcatttgttcgcgaacatttccaaaaagtcgcatcggcggcggagacgaacaaaactggtggagtagcgatgccgttgctggtggctgagattgtccaggagcttaaagctttggaggataacgaccctcgtcactggtatgaattgtcgagagggttcattcttgaccccaagtgctgggatccatcgccattgtgccacgaacccgtgcgcttcagacgcacacttcgtcgaaatgtggtgactggagttggcgagagggatggtgcagatgaaggattcatcaagccagacgcggatgaagttattgcgcaagatgaacagaaacgtcatgaatttgctgaccccgcaaatttcggtccggaagagatgagcaaggagctggtgtcgttactgggggctgttaactcaaagtttagccatgcggagctgaaacggtcgactaaagagctgctcacgtggcggagacaacacgctacaagttgcaatgatgacgagcccgcgtacctccgttcgtgcctcgagtctttacttcgcggcgctaaagacgaggaggagtctaagcttgctcgaagagtgggttacctgctgctggatgtgattgataacttgaaccgagagtcaaacctggatgatccagatgctgttgcttcctcacaagaatgcgagccatgggtaacacttttcgataacgtagttagtgatcctgagcggtgggagttcctcaatctgattcttcgagcgtccgatctgactctgagagctggggatttacagcagtggagaggcacaggcgagagcggcaagttcagtttcctcgacaaactgactgctgctcgcagtccccggtggaatgccgtcgtggtcgagacgattcgtgtgtttcgtattgacgaggtcactccagaccacacgactctgaattctacagaggacgtgcaaaaggttaagcgcattttcgcggatttcgtccagcagtgtgactggcagagcgctgagcggttggccatcgtggtgcaggatcctgagatgatgcagacgctcttcaagcatttatcactgttgaacatgacgaaagctctgaagcggctgcagaaagtctctgctgggattcatagcacaacgggaattgctgtgcaagcagtagcgccaagaagctcaactggtgagacatcgtctcatttgctgggtagtcccattgaccatgcgacgaaccgatctctgagcaagcacaattcactcgagctcaaatggaaatacatcgattctctcgatgggattgagaacattgttcagcatctgaagaagtgtgaagccacattacacttggacgataaacccgacgatcaacgggtggtttggaacgctctggttggaatcgactgcgagtggcggccacagtttctgaccagcaatcaattcgacgaggaccaagctggcttgagcatctaccaactcgctgtgggggaggtggtctacgtgatcgacgtccaagtccttggcaaagctgccgctctaccgctgagtttcatctggacgtccgcatctcgcctcctgctgattggcttttgcgtggcgagcgacattcagaggatcaagaactcgtttcccgtcctggggtcgctcttcgacagaagagatactgtaccgcgtcctctgctgctggagctgaaagatctcgtcttgtttcggcacgttcctgctaagaactggggactgtcgaggctttaccgtgcctgcctcggggaacaagtggacaaggagcaacaatgctccgactggggcagccgcccgctatccagcatccaactggagtacgcagcgaaagacgcgtacgccgttcaacgactcgccttgcacctcctagctgacgtcagcttcaggggggagggctgctccgtaagcgacaacatcctgaactatatgaagggcttcaacgcttgtcgaagcttctcatactcgtggactgtcgcctccgcctcccaaccgcttgggaaacagcacgtcaaagctgctttacaagcgctcggagtgcaggcctgcttcctcagatgcgttgagagtgaaagtgctggactgctggtcaagagtatcgccctattgattcgcaagggaaaacaaaccaacgctccgaggcggatttcgcacgctgtagccgtgttgccactggattcggtccatcgatatgcaagcgctgggatccctattgggagcagacccagaggatatttcgctagcagatcaagaggtacgttgctcacatattggaaaatattttgccactgattcaatctaacgacccacttgttttttgcttggtgcagactttggtgcgagtatttggatactcgcgtggttgtctcggacctgttggcttacgagagcaggatgccatgcagatcgtcgtagacgagtgcgtcaagtccgaggactaccttctctgtggcgctggagaagctgacgaggtctacgcgattgctcccgatgtacttatcaaaacagtagacgccttggtaggtaaaatctctgcttagatagaggagtagatagatagaacatgaattatcccgacacaattgtctgttcatcctcttcaataacgttgggtaaagtcaatgttggaacatttttcctgtaaccaggtatcgatgtggcggttcgagacccttccaggacttgcgtatgtcgaattgcacacctccggccgctgccaatacaggtacagcaccacatcaaaggccttctctggcggctgctgtcatggcactatacgtgcccccttcaatgcaatttttgcgcagccacttgaccagtcgaaggttccccacgctcgcggcggggtccatcgtcatcgccatgagcttgcagcattccggctggtttgaatgcagccaccggataacccggaagtgccctcgtctggcggcgacattgaatgcactgatggtacacttgcagtcggtgttctggtccagccacttgagcatttcgaggtgtccgcgctctgctgctttgtccatggagttcacgttgggcttcaactcgtagttcgcttgaatccattcgaccacatgaacgtgaccgtgaccgactgccagcgccatcgtgttttctgtgcattccgggatggaaaattgcggctctggagtagacgattgccgcttgcgcttgccaacgaccgtcttcgtgttcttcctcgaccgagcgatctcgtgcagatacttcatcacgtggaggtgccccctttcggccgctgcatccatcatcgatcttctgttcctatccgtctggaaaatgtcaagtctgggcttgtgtgcgaacgcttcccttagccactggatcatcaccaagtctccgttcttggcagtctcgtacattattagaggtgtaaacatggcaagaccatgccgatgcaggcactgagcaacctcaaagtgaccgttcttgaccgccttagcaaaggcttcggtagtgcgtgcatgagcgtttccaagcagccattccaccatggctaagtgaccattccctgctgcttgagttagagcctccctctcttgatccgaaaaatagttctcagccaaccacctcgccacttccacgtgaccttttctcgccgcttccgtcaatgccccgcgcttcccagtactgtctataataccgcatttgtccttcaaccacttcatcatttccacattccctccttgcgcagcatagtccagtccagggggtcgtggttgctgtcgtcgccacatttccaacaaccttttgagtagatccaaatccccgtgacgcgcgacctctaccaggacttcgtacttgttcgttggctcaaagcggtcaatcgaagacatccagaggacgagttcgttgtgacctcccgccgccgctgcagccataagcataccagtaggctccctcagggaacgaactacgtggcgatgtccgtattggatacttggacattgtacccccttttcatactccaacagatactcgaggatatcacgatgtcctctgcggcacacctcactagcgacgtcttccgacaccgtgcagcctgaaaagtgctccatgatccaccgaaacgtgcccaaatcgccgcgttttgcagcctccataatccccctctcaaagctccagcagtggtagtgacggtcgttcctcaaaaaggtcgagaaggtccttctaccaggagaaacccactcggctgctgcatcaaccgctgcgaccccagcgcgcacgcccgagcgaacgggatatctggcgaggggtccagatacatcgaaattgccaacgccacatgacccagccctttaagtgcagcgattgactgggtcaccaccttcgcagtagtcaacagatacttgcttctggagcgcaaatttccgagttgtggggcaactcccacatcaacttcctggaccaaaatatagtctcgccccatcattcttttcgacagttccagaccaaaattttgtgcaatacaaaatagtccctagacgacgatttgtgtgtttaaccaaattttgtacaatacaaaaaataccccctggactatttgtgtgtcccatcaaatcattccgttcgagagtccagttcagtgtaaaaagcaacaaatgatcaaggcggcgattctggcggcggcggcgctgctgctctcgggcgtctgcgcgctggacgaggccacgctgcggctgagcatgaccaaggagcgcagcgcggccgagtgcgacgacaactgcgagcgcgacttcatgcccgtgtgcggctcggacggcgtcacgtacggcaacgactgcctgctggagttcgccatctgcgagaacgcgaccatctccaagctctcggaaggcaagtgcatcaagcactcgacgtagatgcgacacgcagaggaagagttttggggtcgagcagtgataaatcagaatacagttggatgtacattttcagtatgatgcgatgatactattattggggaggaggcatgagtagattgtgtgtttccaggccagacatatatcagtcgcgcatcagaggcatcacagtttgccgtgtcgatagacttttttttgctgggttgcagtataccgtacctgttcgtttcgaccgcttatcgagatcaaaccgactggccttaggtacagaatgcggagaagttgacggcacagcactctgttgattctcgcctgattgcacgatgaatacgatgaatactggacgtgcactatgcaacgtgagcaaatttgcgaggtattttaatattttcgcttgagttcggacagtgtagtacgaaaaaaatcttcgggcattcgttgttggcggatttgcatttactcgcaataactggacgtgttactatttcttttccgtggtagaaaaatcattggccctcatgcatgttgcacgatgcaacgtgatattgccgatcatgagatggaccatgcccccatttgacaataagacaacatcagctaatacgatcctcccaaattgtttagggtctcaagaaaacttaggttgatcgcggaaactgtacaactgcaattatttttttatttgacataccggtagcaataggacaacaacaccgactaatacactgcatgtatttacactgcgtgtactgtattatttgaggtttatggcgcatttcgctgtggattgtaggaattcgtggctagcgcttagtggagcatagcaatgtctagcaatgtcacgtgccacaatagcaatgcagcatttctgccccaccttgcctcacgaactgagccgaggcgaagaactgtcttttcggagattgattatctcgtacagtagtaaacagtattagtcattatgaacgaagtttgttcaacgaacgcgcggcagatgtttttaacgtgacggtgaatcttctagccgttcgtgcaatgggctcgcgatgcaaagatcatcctcactttgcttttttcttcttcctgctctttcgatcacgatgaagcttgtctccgccttcttcgccgtgtctttgttggtaagcgccacggccatcgacgcgggcaccaacgcccttacccaggtccaagttgacgccagctccgcctacaagcaaggtgaagtcatgcccgccgatcaaacggcagcaagtagcgctgaagtctcccaagactcccccactcaaggcaacccaaaccaattctggtaactacgaccctgcccaaaagtctgggggctcggacgaatcacagaagcagactccgcctgtcttcacgggcaagtgcactctcactggagactacgtcaacaacacatatgtgagtgcatgcaaaaccatcgtcatcgactcccttcgggtgcctactggcgtccagctgaatttgactcagttgcaagacaatgccaagatcaagtttcagggcacgtccacctttgggcctaaggtaagttttgtacaccaacgagccagccaatttccccaagttttatttttttaaacacttaatgcatttctgtgtaaccttcgagcaccggtaattgcactggcgagccgtccaacattcagtgctaattgtttccaaggaaaccactgtgacgtggtgtgctcaaagcaaaactccgaagtacacggacaagtttgggccacaagaaaagaaaatatagttgctgtttttcgctctccattatcttaacccaatgaacccaaaacagttaagttctataccttaggttggctcttgagcaacttacggcagttttcacataatatattcgacccagagatagaagttgttgctcgaatgagagcttataaaggatacgaaggtagtggggccagaatagcacatcattttcgtagttactgcataacaaagtgaagcagaccaaacctttgtttaagaaaaccaaaaaacaaagagctccaatgtacatatcgtcgagtatactcaacttatatatatttgggcccgcattttatgttgtgataaatgcgggaagatcgcgccttcagttttgctttaggtgccggcgagattcgtattgggtggggatccacaaacttgtttgtgggtttctacaaggtagctataaaggcttctaattaattacaaacttccatcaacgataacgatatgagtaaaacagctaacccgttgaccttgtcaggaagtacagtagtattaatactcattctccatagcccagagtacgattttggataagaaatgcgtctaactcgacgagcactttggtattaattactcggtccatattagcgaagtacgacacttcactttaccggtcggagacagatgaaagagactcagcgtcggagttcatgccgtgctgaagtacctctactaagcaaactaagtcaaactgggggagatatcgaggtcacttcatacattcacgttagactcaactgttggcgagatcagtcgtctgctacagcgccgctttacttctcacttgtggcatcttcccctgcccagccgattgatcttggggtccaagcagtgcgcaacctctagcatgcactcgttggcgtaggtgacgttgttggaaccacatacggggcttaaatcgcgttcgcagagcgtcggacacttgtcttccggataggggtcttggtagaagctttcgcgctcgtgcttgtgagctggagcagtcccataagcaccatgacaaccaacttgttgatattcatcgcttcttctcgtcgtaattatactacatgtatagagttggagatgttgtcgcttgtgcgcgctgggttcaaaagagaaagtggggagtcagcgtgcagagccaaatgaaaaatcacgaggtgcgtacgaaacgttgtaacttacaacgtttcgtacaacttgtaagtaagggatgatggtcgattgtcacctcgtaaggcacagcagaatcaccggttgtacacagtacatgtatacggatatgccatctacattggtggtgattcaccacctggtgaaccatgtatcaagctccagagctgatactttctcgtcaaagctgctcaaatctgaataagcaatcctaaattatagagtttatacctagagctgcacggctgtaataatacggagtagaaagaaacaggttacaagcttacgcacgagctatgcttataggcaacccggagcgttgctccgggagggtacacaggtcgacgaatagtttcatggacgatgataacggataataattgagtaaatcccaaagttgttttgttttaatccttaaaagcactaccagcccaactaactctctagttgattctaacgtgggcatctactgcgcctgctcgcagccgcagcatctgcccgagaatgcgtaattgaacaaatagttgcgcacatcgaagtgtatcgatacggaaatgatgtttcagccaaacctttgtgaggctggtaaccagcaagccccgctcttctttatcgtggtgggttctcaggagccgaaagtcaccaattgaggttgcctgatctgatgatcggtgacataacaccctggtcagcgtccaatgactgcgttggcgccagcaacgagagagctatttcattcattttgcaggtaaggtatactgtgctcatttttgtactgttgtgtgctaacgatcagacgagagaactacagtagcggaacgaaggagagacgcatggtgcgctgattttgaccattaacttgaggatgttagctaagtgacaataatgatcctcaattcaaaaacaaaacaaacaagcaaacttttaacttgagggcttgggggataaatcgcggaatgagaaatacgctaatgggccaattccttggaagtgggtgcttcatcgcagggaaaaaagtcttgttcaaacgaacgatgctcgtgtcactgtcgagttgagctgattggtttggcgacagacacgaggttgggcatcttcggctaagagtgattgggtattgagcaaattgacatgtaaaaaaatgcagacaagtcatgttgttcatcttcagctaagcttggtcgattatggcgcaaattgatacaccttcagcgaagccatgacgctctcatactgtactagagcgtccgtaagtgtttgaatgcaggttgtggtcaataataaatgattagtatcaacctttggtaaataatgtgcataaatcttagcatttatcgacgggtacccgattccggcagatattagcttaaacattacaattaagaaagagagacccggtttggtacccggttttggaaagttacaagttttttgccggggccaagcacaggtcttcgacctgtgaacagaacagccgcaccatcaatcatgcccaaccctaaatatgaacgcggttcgcattttacagagttttatcaacggttattatgacatgttctgggataggaagcaacgttagtggtgctattgcagaccaaataggattatactgggataggaagcaacgttagaccaaataggattatatccgtggtacgtcaagtcaaacgatgacccctcctgacatctaactggtatattttcttgaaaccggtacgactccggtgccgcactgggccctccatccaaaaggtttatatgcgtgggcagatcgaaccggtgtgctaccgacgacactggtatgaatcagtacacaaattgagctgggtacggatggacgaagtgaagcaaagagaacgattgaggcggactgtacaatagcatgcattttctacaaactgcaaacagatctcaaccaagtaaaactgtagatgcaagatatcaaccgacaatgcattacaaaattaaaaagcaaacaggcaaatttccggatagatgctgtggctgcgaagcaggcgcaggagatgaccgtagctaataagaaaagcaattgataaaaataaaaaataaaaagaaggggtttatactaaatcctcctgtcccagccttcgcggaaccctagtacggggcgctatgtatttttaaactatttttttgcggtcaaccttggtagcactcagggcgagcgcggcatcaacgtcgagtacccctcaccctacacggcgggccaagatgtgcgtagggtaattagcaaggacactacagttgccgagttggttgcactcggtaatgtaaactacaatcctttgtgctttgctctcattctgtctaaacgaaggcgtaaatcgttgttttgtattttaacttcatcgtaattcgttgttttaccataacccaacgacccttacttcgatggtattggatgctattctgtactgtcgcccaggctttgattatcgttggaatggcgcatttgcaaccgccaatccacgatttcccgtgtaaatcaagcttaaatcgagcttttcgctcgcgcatcgcagggcaagtcgcttactcaatgattattctaggatttgactttgaattagccagcctaatcgactgacagaattggtgaagagcacaaatattatcacgtatttacaacaggtccacagctcctgacaaagcaaaagcttctaacgacagctgatgttctgactgagagacggcaccatagagctatagagcggaccgaatccagtggctgactgactgtgtgtacagtacaggtattgtgcacttgtcaagggcacgtaaggtcactgtaccgctttagtacttaaatatttcactttcaacttcatggattcgtgcgagccttatcaggtctataataacctgaaggaggtccagataagccaccacagcctgtggttctcgtccctgtggtcaccacaggggcgagaacgcgcaaagtaacggcggtcggcacgcaaagcttctgacgcctgatcatggcgcattataagaaggtaatttcatcggcaccctctatccgacgtttgctcgacgtacgaggttactaattactagtacatccgtagtgttcgtacatcacgacggcaacgacgtcagaagcctcactttggtcttatattgatatatcgatttatcgaaggcaataggggagattataaagtacgagtcgagttgcgagtcagaacgcataatattatgaatgtgcgatatagcccagcgtaaacgagggagtgacccccacgttctactcgcgtgtgcagagcaaaagagtgtgtaccgtaatcgagtgttccaccaagacagcaaaggagaaaacgtcaaaaggtgtatgcgttgggaaaacgtttgtcaataggtgtagtggtcgtgggcgtcacgtcgcgtcatgtctcatcatacacgtactgacacacgttttggttgccgcggtatttcggccgaggtcgggtcatacagacccaggatcgagcttccatgcacagtagtttattaacgacacgctcgtccggttcgtggtgcccatgactttgatagcgaattgtacgactgagggactacaatgaacgtcgttatccattgtagccaggcctcagcgttgccacagttctataatacctacactctcccccggttgggggctctcactagagctccttcacctccgaaattcagatgcaaaacctacctagtacagccatgctatagacgcttgcggtttgcgttggtagttccttgtagccacaatagcgaagttgtcgagtacagttgctctatatgctattattagttgaccgtgttcgctgctagttgcatcaggtagaagccttcctaaccccgggttttatggatttggatctaagcccacacaccagtcaccgcattcgttgctgatgcagctttatgatgcaccttagtgcgcttggaaccacatacacatactgtcataccgacaacctagcatacacctaatgacacgagttaacgcttttgacaaaacgtttcaaattcatacaccttttgacgttttcccacagcaaagtgcttaccaactggctccccaatcaatccgtacagacgccagcgttgccttgtttgtgtcagtcccatcattaacccgatcacggatgatcaagccaagcacctggcttccttgcggctcgacgccattcctcctccgcctcctcactttgggttttgctccgaacagcaaaagcagtagcagacaatcgacgactgcatcaccatgaacaagctggcgatcttggcggccgtggcgctgctgcagctgacaggaaccagcgcgcgaatcaattccactacggtcgatcccgaagacaggtgcccgacgctctgcgaacgcgactttatgcctcaatgcgggtcggacagcgtcacgtacgcgaacatttgtctgctgaaggtggcgcactgcctggacccggaggtcaagaggaagcacaagggacgatgcaagaaaaccaagcgtttcgtttcacgtattcaccaaatggtcgagtgaaaaaagcgtcgggagcctacaactgcattatcgagcggaagttgagctgttgcgcgagaatatacgaagatagtcaatgtcaattttacgctgcacctagttggggcctatatgatgcggtctacgcaaaacttttaagttgtgctagcatagtgttcaactggtgcgtgatgtccttgaattctcgacgcagcagctcgagtcgattcagtctaactacttgtttgcctcccggaaagcgggagacaagtaccaaacgcagagtgtcgcgcgcttgtcgattcggagctagcctgcaaggtagaaatacaatacgttaggttgatccgttgattttggcgagccaaacgacacggtaatcatggctgaacaatgtttgcagctcaacttggtacatgtaggtaggaccctttatacgtacgtaacaggtatacatgtaatttaataatgcatcttcgcgtaacctattctcgggtggaattgtggtgcttatttgctttgatccctgccgtgtgcacgtgcaaactttggcattgaagaatggcacgaccaaaaggccaaggtcatcagcgaagcagcacagtaactcgtctgtggctaaataagcacacatattcggtgggaagaaccacactcagcaaactcattgcatggctcacgccatgcaatttaactttacgagtagacttggttttacgcaacgttggagcaggcaggtgtgtcacctgagagcgggacagcaaaacgataaaataccttttgcgagtatctgtaggtgaagttatcgacatgcggctaacaatggcggcgacgattttctctttatcaagtgcaaaacgagctgatatgaacttcagacaatcatttgcgttgattcaggtgctcgttgtggtctgatggctgatatctttcttttagtctccgactactgtagagcaacttgcaacaacgagccttctgtaacaggtatgaaatgtagccatgccagacggtgatcgcggcagcggttgcagagcccaacagcccgaagtggcaaccatgccgagaaccgcacatgaaggatctttgggctagagggtcgcgccgtgggcagtggtccgaggaacggatcgaagagagtggtgagcagcgcgcgacgggtggcgtgctccgtcgccgcgcgagctagcggcgctcacttgggtttgtacccggacgagagcaagtgggggcacccgcagcccttgcagcggcgcacggcgagctgtcggacgatgtcgagctgacggacgagaacgagctgccggacgtggacgagctgacgaacgacgagagcgagtcgcagaacgacaacgagctgccctggttgtactgaggttaataaataggggcgtaggtcccggttgctttgcggtggcccacaggtgttgatgttgaagtgacaaacccctcatggtagcggaccttggcgtggacacagcaaaagcactacgggcgacggcccgctggcgagctggcgttagcagactcgttacacttctaatgtagcaggcgcgtaaatatttgaaaatactcgaatggaaatggcatgacggtagtgtggggcgttttgctgttagtagaatttactagacaataactcactgttagttgtacgtttgctgattgtaagcaggggttcgatatattgtggttaaagttgaggtaaagtgaacgacaagctgcactttttagcataaaatgtagaagaagagattgaccaagcagagcagtaaaagctattctcataatctgtcctgaactacagcaaatgtatcaactacatggctcagcatcttcagccctccgtttgctcgcttccttgcgtctcctgcgtgtcctcgtcgtcttcagcgccctcgcacagcatttgctgcagctcggtattgcgggcgttcgcagcgtcaagctgtcttccgaacgttgccgccttgcgcctttcacgtcgcatctggaccctcagggcgttggtttcgaacttgagctggctggcttccgcttctttgagagacatcatgtgctgcagcaccacaacgtgctgttctgcttttttgagttgcttttgggcccgcttcgtctcctcctcctgcacctgcaattgcgtgcgcgccttggtgagctcctccgtcgcctctttcgcatcctccagctgcagctgcaaatgcgtgcgcagcttggagagttcctccttcagcacggagccgtcgtcggctttcccttccttccccttgagccccgccttggtgtcgtggtcctccttgagcgcgcgcagctccttcagctcactggtgcgcttggctcgcgtgcagatgcgactcagcgtgccgcgattaatcttgagctgggggaagcgggcgcgcatctccgcagtgatgcacgcccacttcgtgccgtggaagacctcgggcagctcggtccgggcgtccgaccagttggggtacgtccgctccagccgtaacacggtcttgtgcgcctccaccgtgagcttgtacgacaccgtcccgcaccgaacgtcgtcgtctccgcgccgcgtctttagcttcttagctacgggctcgcagcagcagctctgctcctcagctgcggcactctcagcagtagcagtagcagtagcagtagcagtagcagtagcagtagcagtagcagtagcagccgctgccgccgcgtcctccgtctgctcacggctttcgcccgccatgtttctctccagcttctcttctctccacggcaaaggccaagtgcgtccccgatccagtgcagcgtcccaaggaatgcatgtcaacttcaacttccctcccattcgtcaaccgccaccgcattatccgccaatcgcagccctacatgtattcatccctatcatacaatacacacagtccagcatgacgccccgaaccgaggtgcggcgccagaagcagcggctggacgcgccgctcgtggcgctcttcgtcttctccgtggcgctcaagctgctgctgctgccgtcctacaccagcacggacttcgaggtgcaccgcaactggctgagcctcacgcacgagctgccgcgccgccggtggtaccatgaggccacgagcgagtggacgctcgactacccgcccttcttcgcctacttcgagtacgcgctgagctttgcggccgctgcagtggacaagagcatgctggtgctcagctccacgcccgtgttctctccctccatcctgctcttccagcgactcagcgtcgtcgcgtccgacgtggtgctgttctacgcgctgcacgcgtactgctcgtcctggcccacggtcaccacgacggagtgggcgttctccagggccaagagactcgccatcatgctcgtcacggtgctggacgcggggctgctgtacgtggaccacatccacttccagtacaacggcatgctgctcgggctgctcatcctgtcggccaccaagttccggctgcagcaggacctgcagggcgccttcctctacgccgtgctgctcatgttcaagcacatttacctgtacgtggcgccgctgtacttcatctacctgctgggccactactgctacgtcaagaaggccgactcggggtcgtctgatgacgatgaagataacaatgggaaggtgctgaggaagagatccatctcgagcaccgacgtgcacgagacgattcaggatctgcacgacggcaacgtggtgttctcggtcgtgaactttgtgcgtctcggggtgatggtgctggcggtgttcgcgctcgcattcggatccattctgtgggaccacgaagacccgatcgccggcatgaagcagatcctgtctcgactgttccccgtgcagagaggactgtgccacgcgtactgggcccctaatgtgtgggcgctgtacgcgttcctcgacaaggtgctggtgattctgggcttcccggcctcgaccgagggagtcgcgcttatgagcggtggactcgtgcaggaggccagcttcgcagtgctccccactgtgtcgccgctggtgtgtgctgttctaacgttcgtgatgatgactccggtgctgcgaagtatctggaggtacccggactcgtcgctctttaccagtgcgcttgcgtactgcatgctgtgctcgttcctgctgggctaccacgtgcacgagaaggcgattcttcaagtgacgcttcccatggcgctaatggccgctgacagcgtcgctagcatgaggctgtacagattcgcgtctggcgtcgctaccgtctcgctcttcccgctgctgttcacacccgctgagcaggggtcgaaggtgctgctgggtgcgtgtcacgctcttctggcggaggttgtgctcgtcccgcttctcaagcagtcgctgaaagagcgtcacatcaaggtcacggctgtgcagatgtctctctttgagcgggtgtttcttgctggactggcgggtcttgccttgctggctgcggtgtttccgtacattccgagaatcggtagccgctacccgttcttacccctgatgttgatctcggttagctgcgctattggaaacatctatgtgtggggcttcacagtcacccaacactttagaaagcttgatgctgtcaagtactacctcgatgcgcaaaggcccaagtaaatagctgacttccaagatcgtcaagtctcgagctaggacaatgaaatagattggtgtgatttcccttgtttttcatttttcttgttcttatcttctgcagtttaaacatgcatgggtatgatgttcaccgcacagtgtgttgtgaaccaacttaccactctctacgacagcttgccaagctgctgcttcttcttgatggagttcatggcgtggaacacgcccgagtccaccaggccaaggatggtgaagacaccgccgatcactgcgcacaggtgcgtgatgaagtggtagaacgggatgctgtctgacgtgatctggaccaccagcggcgagatgtcgaaggtgaagagcgcagacggctgcttgtcctcgtactgggtcgttgtcgccgaaaactcgtacgatcgctgctgcaggtgcgtcttccgcgtgttgtcctggttgtcaaagccgaccacctgttcgcaccaatcgacagcataaaggtcagtctacgtaagtgatacagcaactcaatggaggcaaggatacaccaccacgtacgtttaggaagtgctgcaccgtgacgttctcgctctcaatggtgtacgtcttcttgtccagcgggaaacggttcgacggcgcagccagcagaccaacggctccagcgaacaagttttcggtgcgtcgcacctggccaaacgagaagtggttgacgacgtgcgagacgtcgacggcttgggcgttgaacgacacctcgtcggagcgcgccgtgaacaccagcatacccgggactcggttcacactgatacttcccgagatctcgcagccttccaccgctcccgactgcattgtcgccgacggacggcgcttcttgaagtcgattccctccaggttctcctcgttcacgcgcacaggcaggggaagccccagtcggttgttgttcatgttcacctcctcagcgaaatcggcgtccggctcgagacggcggaagaacaggtcgaggaattgcagcaggtgctccgtcttgcgcgggccgttgtagatgtacctggtggacgtgctgccgtacatgtagatgagcatggacgggaacgcgcggatgtgcgcgcggcggcagagccacacggcgtcggggtccgtgcagtccacggaggccatgcggaccatctcgctgtactccgggtggtcgggcagctgcgccgccgcgcgctcccactcggggtggagctggtggcagaacggacaccagggcgcgtagaagttgacgagcacgagctcgtacttggccatgaagtcgtcgaaattcttggaggtcagcggcgtcgagtagtgcacgctggtctgcgtgtcccggtgcacgccgccccacacggggatgcccttctcgtggttgtcgatgaccacctcgtccaggcgctgcacctggtcgtgctcgcggtccgacgccagccggaagtggcggatgtggcgcgtgaggttcgtgaagcgctggcccatgtggtcctccaggtccacgctggccacggcgcacggcacgttgagcagactcacgttgaagttgacgcgtagtcggtcctcctggtgctcgtccatgaccacggtggtgcgcgtgctctgcagccggtaggcctcccagtgggtcaccagcagcaggcccatggccacgaaggacagcagcgagaagaaggagccgctgtacgtgtgcacttgcaggtcgtccggcaggtgcctgcggagggggaagcacggcgagttaggaggtgggggttacatgggtgggagcgcgacaaggaggaggccatgtggaagaagtttgaagagctgcggggcgctgggagacgagagagcacgcaccggaagaagtcgagccgcgccatattggagcgccgagcttttgccacgtcggcgattgcgaactgttgcgtgttgatttgtattgaaagggttttggccaatgagagaagtgaaacgatgcgattggtgagaaaaatatacattttattagtagatcgccctctgtttaggtaggccaatgaggacgtttttgaggacacttcttttgttgttgtaaattttgtggtgaggttgcgcgggtatcgcattaaaacggcatctacgaagcgatcgagcatgatgcagtgggtcttgccctgccttcaccgaaatgcaattgtacggaaccataacgcggacatcgctgacccccacaccctctttcagtgtctgtaggagcctactgcaccccatcttgcaaatttggcgccggaattggctccagcgtcccacatgcatagtgcatactggtacgcctaccgaggggtttcagggacgaacaaagtttgtactgctgcgctcgcgttcgcgttttcagcttggacgcagtgcgtggtggtgctaataactttgtcttgcgtttaaaaaatcgctagcgtgcaatcctcacaactaaacaacaccgcattcagtacatgtacacgcacaccgtatgcaaagctttcccctcgacgacaattttccaccagttttactgcaacactgatcattgttcattgcatgtgaggcgtgcatccgatggcaacgctgaaggaagcgtacacgtattatttatccctgtttctgaattgacgtgtcattcgacctgacaggctgtcaggttgcagcgttacacgggcccactgtagtctaggaagggtacgattttttttaaatctcagcgccgtcctaggctttacacgaagtatggatatgctatcctaagaatcaatcagaaagacgcgctgtccgtccgtcacaaaatcgtcacgcttattcactaagtacgattcccactaagttcgattagctgccgagcgtagcgaaggcggcccagtaatggcacaaacaaccttttgctgccgagcgtagcgaaggcagaccccccccccttgcgatctagcgggaccgcagggcctgcccaatactattaactaataacactgcgagtagtgcagcgagccgacgaggcgagcggaacgggggcgataagatcacccccgttcggatcaccgcgttatagcaaagcgataggtagctgggcctgccctactactaagtataatagtaaggtagcgaggttggttcatataaacacattgtaagccatagcagcgcatagttagttatagcagcacgtagtcagcgataggataggagcgcatagttaagcgctagcagcacgtagtgagcggcatgcacgtctagttagcgatagcagcacgcagaaagtgataggagcacgtagtaagtgatagcagcaacgttgtaagtggtagcagtgcgagtacatgtagcgcaaggtgagctgaaggtagttaagtattaacaaggagccgagcttatttcactatagtaaaactacagggacaaattaactacaactaccgcgtacttggctctcaacgtgataaacatccttcgaagtatctgctattgctaaaaggggttcatgtgtgtgtgaataaggtgtatttaggttacttacactacgctggtatttactctttctaccgcgccatgctgaacctgaactcccttccgttctctgtatagcattggagatcgggatacaggctaaaggctaaaagtggttcatgcatcgatagcttatgttatgtgtcggtatgtagtataatgagatctgaatagtagacgctgacattcaatgagctggagttctatgatagataaccttggacgcgctctacctgtatgctaaacgctggaaacggaacttgcatagtgcaacgtgtacttcatagatacgaaatgcaaagttgttactttcaatgtcttagcggctgtggtgcaggtggtgcgctaatgtgcttatgtactccgcttagactaatacttaaataaaaataagttttgatgaggccacattatcgcagcccgaagttgaacacatttatggatcatataaatgccgaaacgatcccgatatgtatatgttcacgatgttctaataagaacgaagtactaacgatatgctaaggagaggtattgcgaagcgtgaattgttatttaggcttatagccttgatacagaatgtaaaggctatactcttggaccaactaacagaaaccatggcagagtgatacacttggtaaaataacacgtatacagacttatgagagcacactaaacacgagctgttctaagtgcagatactttgtagtttgggttgaatacctgcgacgatgttggacatggtttacaacacagtaccgtgcgatagaaaatatattatcttgcaagtgcatctacttatggtaacactgacgtgatgaagctgataccagccacttttaaccatactaagagtactcccaacatacaaacaccttcttacgtgcatacaatccaaattaatgacatttgactggaaaacagcccaccggagcgaagtggaggtgggcggccctcactactacgactaacctaaacttaccgccgcgtagcggcggcgctcggctagtcgagcgacacagcgccaaagaatttaggacgagtctgtagttgacacccagagccagcctgtcgtggacttcatatagccagccggctacaacttgtttcctggtcttgcgctaacagccatcgtgatgtcgaatatttcagataaggctagcttcacacgggcactagtacttgcacggttaccggtagtggtgacttagttgctacagcaccaggataaactacgcttgaatggacgatggctcactacgatcagtcgagcagaccacgccgttgttgccgtcgtaatagtcgaagcggactgtaatcagcgaaccagtgcggggggtcaaattcatcggcgtattgcttagatactttgaacgccgcaccgcaaggccacaaacttggacgcagatggctaagcgcatgacgtttaacgtcaaagcccttgtttctgcccgcgaagtaccgatctcgtcgatttgacaccgtcgaatcgagcaagagctgcagcatcttggacctttggccacttctgcttccccgtcgtactgcgcagcgcagccgaaactcttgccttacgatcgagtggtccctgtgaagaagatgctggacttatcaccggaagaccaggagtactgtcgggatgtgacgacccaactgctcgatcgaaccctgtacgagtgcgaggagcttggcctggacacggccccggccgcgaacctcgcgcgcctggacagcaagcgatggaaaaagctccagacgcacccgactgtgacgctgtacggtgagcgcaaccccaaagccgcgtggtccccgatgatgcaccgagaagactgggagcatcctgtcgcggttgtcgctattggcgtgttcaagtgctcgctggacgacatgctgctcgggttgttaaccccggacgtcggcgcccaaaagacgagaagcgtgcttatgggtcgacgcccggaggcccattgccaccatcagagcattgtgaggcctactcgagcgaaacctttccaccttctggctgttagtcgttatatcaacacgcagcactggccgtacacgatgttcgtgggtcctcgggagatggtggtggcctttgccacgggtgaagtggtcacctcaagtgggaaacgcgtcggctacgagatcgttcagtcggtgtcgctggaccaaacgtaccctcgctctccttcattgccgcggtcccaaatgatcaaagcccgagtcttctgggagcagccggatgggtccgtggggatgtacaacaaactcgtcgtggacgtgaaatctcacctcccggacgcagtaaaagtcggaaatgtctgtcgaggagcgatgtgtttgtggaaattcgtgccacgaagtatcgagatcaagaagctgcggtggtgcctgaagaacaggaaggtcatgacccgcgagctgcagcgcgaatcgcggatgcttggctgtgctgcgtgtgggatcatcacgcagaagtctcaggctgcaaacaaaggaggcgcgaagaacgagtcgtcgaagaatcagtgcgagttctgcgaggcgtggctgtgtggactgtcatattgccgggcaacgtgtcaggtcaagatgctaaactgtagcgacaccaagatgtacgagcaaacagtgatggtttgtccccgctgcatttccttcgtgcgaagtatagctgcgattgagattgtacgttctgaattgttagaggcgctgaaaaatgctcatggggggctcgcaaactgggagcaaaacggttatgcttggtcaccgacatcaggttcgtcgacggattatgaataaattagtagaatattcacaaccattatcttcgcatcgtatccgctgtatttgtgtgtgtgatggtgaggggtgggttctgaagttcataagctcgttttgcacttgaaatcgcgtcgccattgttaaccgcgtgttgatatcttcatctagagatactcgcaaaaaaatttttttaccgtttatctgtcccccgcgcaagacgtgccacacctacatgtacttacagtcttgcgtaagactacgtctagtcatatcgaagcgtagtgctacgcaattaggttgctgatggtggtgctaactgtaaatttgattggaatatgtatggtaatttagacaaggatcacttagtgcgtaatgtacttcgctgatggcaaagcttgcacgtttacacggcaggggccaaagtacaataaacaccacaattctacctgacactaggtttcgcgagcatgtatgacctacacgtaaagcgataccaagtcacgctgcgagcattgttcaatcaggattaccgtatcatttggctctccaaatcaacgaatcactactactagtattactggaggctcgctcagagcgcatgaatcgacaagtgcgcaacgccccgcgcattggggaacaattaaggccggtgcgaattcaaggacattacgtaccagtcgaacactatgccatcgcgcaggatcgacggcttatcaacttctgcttatagaccgcatcatttcggtctcaactaggtgtaaaaatggccttcattatctttgtatgttctcgcgaaacagctcagctcccgctcgataatgcttttcgtaagtcgtgattcggttaacaccaacacacggcacaatcgcaaacaagtgcagttcctacaaaaaatcaaagcttgaaaagctaatcaggcccagagaagctgccagtggctcacttcagaggcttgaccgccgcttccaccagcttgaaattctccgccatcgcccccttcaactgggccagcagaaacttcattttctccttcccattccgcttctccttctccaggtcggcgacgaactcttccatttgttgggcttggctctccaggagacagacccgattctgtaaactcagcacttgggtttcgtactctcctcgaagcagcaacgccgtttgacgaccttcgcttagggtatcggctttcttctccaggtcgtccaccttgcgcaccagagactcacgctcgacctcgtcttgttcacgctggtgcgccagctcggtggcatccgcgaagaatgccgccaaatcttgctggagttgggcgggaccaactgagccagcaagtctggcattttctgcccttttgtcgatgctattgtcctccctccaccgtcttaacgtcttgagctcgcagcattttttccagtaggcgcacgtgttcaccatcgagcgtttattcacttccagctcggggaagtcggccttcatctcggcctcgatcgctttccactttactttgtggcgcagctccgccggttctgtggagcgccgcgtgggccagtcggggaatgtcgactccagccaaacgagcagctcgtgctgaactggcgtcaacttgaacgacttcacatcgttgtccttgttcagcttcagcttcttgctgtccggggcggagtcaggcggaggacgctcgtgctggacgttgcttgaagctgcttcagagtggtcactaagcttaggaccagctaccgtcgacgtgacttggtttggagggggaggttgagtgcccaactccatggtgctcaattggaactgatggacaaactgacagtgttggatcctaacggtgtggagaacgctgtagcagggtcccaaggcagcttcaatttgatgtgtggatttagccatgttcctactaggcgtcgaaactttacgtggattgtacggtgatacggtaattaacttttgcggcgactcactctagtgtgagaagaacgacaacgagtatcccacgagcgtaagaatgcaagctaactggctagccgagcgcatctggttgactgtgtggtcgttgtctaagtgatagcgatcaacgcaaatataggttagcgatagttgacacaagcaggatatagtgacattcgtccacataccgtagttccataagcttaacttggtttccgcgtcgttgagtcgcattgtttcggtgcagtaattctcacccagattcagagctacttatgtatgcactagagaagttgcaattattgcagtccaccagcaacaaaaactgtttgaacttacctccattacggtgagtcatcggaaatcggacacgagcgcgaatccgatggggatatagagcaggaatgcaaccagaaacagcgtcaagatcttgttggcacgagaaagttcgaagctcgcaaaggtctgtagtggtacttagtagtagtaggaactaaagcgtaagtgttatcattaaaaggcaaattttgccaagtgtagcacataataaagatccgagcgtacgttaagcagcagagcgactgcttccagaacgaaatatcagtacgcaacgtactgatgaacatcgggatagctcgcagtgctgaagaatgacaagatgggcagaccaagtgccgatagcacccccaccaccctcacagccttgcagtatttgcgtcttcatgcctagacgttccatctggaagtggtagttaaccgtccaggtcaatacgaggctgatagcttccgtggtcaaccctgcgcagaagaaagcgttatgtctgtgaatcgacagaacgagaaaattaccgttatctatgaaaaatttgcgcaagatttctgaaagaaatttggccaatcctgtaccagtgtcggataaatagaaacatatgagcccccccaggcacttggggttagcattcgcgacctatacacaagggatcaacgtcgctacgaccaggacaattgctgccaccggtgtgactcgagttccgaccgagtatggaactattctgcttggctgtcctaaacgggacgcaggcaactcaactgagagcaggtcagataatgagctgctcggtcctccgagattgagctctgggtctatcatgatgcttctaaacttatgcattgataactacagagcttcaaaatctggtagatattcgctgtgtatcgcttcagctgtcggtgcatcccttcgtaacagtctcctatcgtgtgaaaagaatgacattgagtacccgactagcatgatgatcgacgccaactgactggctgagcgcatttggtgcagtccgtggtccttgtctagccaaaacgggttgaggtcagggagaaattctccatgccaagagcagtccatcgtcacgtactgtagtttcgtagcactgtgtctgtatcatttagcctcactgtgtcagtgcagtatttctcacccagattcagcttcaggcactggaacgaatacaagaaaggggtaaggtacaactacgataattgacacaatgcgcattgctcacgtacgtcttgaacggtcagcgggtggaatccattagcccctccaaagagtatcaggccaattggcaagggcaaaacggcgatccagaacaacatcgtcacagccaactggatgtaaaatgtgcgcttgatgctcttgcacggagccttcacagccgatggagcctcagattcatccgacgtatagtacgattcgtcagcaccgatgagacgcactagcctgaagctgacgaaggtctgagccagtcatagacaaagagatcaatagaccgactatcgccacatgtgttgaaacgtgcattctcgtacattgagtaccagcgcgattgcctcgagggagaaaaaccagtagacggcatatgcgtggaccttcgggtagctcgtcgtcctaaagaacgccagcaagggcagaccaaacgtcgagataacccccaacacgcggacgattttgcagtatttctgcgtctttgccgcgtgaagcttctcggtatttcctgaacacgttttcatcagctccctctggtactgatagttggcgcaccacgtcactacgagagcagccgctacgatcgtcatccctgcgcagaagatggaatatcccggggcttctgcagaacaacaaggtgaaagtatgagcacagaccaaagtagtcagagtaactcgatcttacagcctgtgtcggaaaagtagggccacgccaagccaccgaggtagatacccttggtttttgcaatagagacacaggtgaccaacgttacgatcgtagtcgacatcaccacgacgggcgcgacgcgaatcccgatcatgaggggcgtaggctgcatctgggctgatgttgtcttcagctgtgcagcaaatgcccgagcggaaaagagctaacaagtgtgtgtgttttggagagccaaacgaccatcgcgaaggaggcaattggttattgctttcggtggacggccgaccgactatccctcagggtcgaagcctgtcggacagcagtttaccaacctcgacggcagagcgaacttcatactggtgctaacattaggtaagagagtgaatatggatattccgagtctcgtccgacaaggtcgtcctcggacgaccaagtcttgtcagcgatgccattttttttaagtattgcagattttaaatttaattgcaggattgatcccggacagagaacccaagcgtggacgtaatgatcgagaaaaagaaagaaatgctaagataacagtcaaagccgaggcaatgttagatggtatcgtcatgtagcgattcgctgctatgcgagaggaacgacatcgaatacccaacgagtgtaagaatgcacgccaactgacttgctgagcgcatttgctggatcccatggttattgtctagaacaataacaaagcaatcatcagctcgtctgtcgacagagttttaagaccaaagcacgcaccatagttccatagcacagtgtctgtgtcgttgagcttcattgtgtccgtgcagtacttctctccaaggtcaagttccaggcactaaacacatccacaattggttaaaacgtcgacaataacactcgtttcgagtgtttcaacactcaaaacaatagctggacgtacgtctgcgatggtgagacgctggaactcgtcgatgagtgccagtccgataggaatataaagcaggaaggcgatccagaacaacgtggtggagaccacctgaatgtagaacgtgcgcttcgtagacgactttgagtcattccacgggttgaacacgttcgaagaggacggctgcacctccgagtcgccggatgtgaagtacgggttgccggcacttgtgaggcgcgccagcttaaagctggcaattgtctgtagcagccattgtacacaagcatcaagctatcagtgactcttcccgccgtgttttatccacaacaagaacgtacattgacgaccagagcaatcgcctccagcacaaagaaccagtaggcagcatacgcgtgaacgcttggatagctcgtcgtgctaaagaacgccagtatcggcagcccaaccgtggagaggacgcccagcacgcgaaccacctcgcagtacttgcggatcgacgccgggtagtggttctccgtgttgtcccgggcctccctctccatcaactcccgctggaactcgtagttggtaagccacgtgagcacaagagcaatggccacagtcgtcagccccacacagaagatcgtgtacccgggagagtctgcagtacagcaacaacaaagtaattgtcagagggttacgctcttacgtgaatcgattccagcagcaatgtatgtaccaacctctgcccgtgtcggagaagtagggatacgccaggccgcctaggtagatgtccttggccttggcgacggacacgcacgtgacgagcgtggcgatgacgacggtcgtggccacgatgggcgcggcccgaatgccgatggcgtagggcacgagcggcattctgcgcgtcttgaagctcttcttcggcggcggcagcagacgctcctgcagctctggggagttcgcgagtgtcatagcgccacgtccagcggcggtggggcgactatcccgtcgtgtcgtcgaactaaacgtccgtccagacgtaaggccagcccaagggccacgtgggaggaccctactcatgtgtaacgcaatatagatggctacatttgtgcacttcaacatacagttcgcttcaacttggggcatacaaatctccatataaaacgatcttacaacaaacgccttctagcgcttctggtggttgacgacgcgcatgacgatatacgtggccagacgcatagcgagtagaacgcccaccacgacggccacggagcacgcggtgtcctcgcgccgcgctccgaacacttcgtcgatgtacgaggtgagcgggatgttagccacggcgggcggcgcgtccgtgagcggctggcagccgagcggccagtgcgagacgtcgatggtcgtgttggaggccgcggcctccgcgatctgctgcagttgctcgtcggggcagtcgcccagcaccagcgccgtgagcacctcgaacgtgtagcggtgcggcacgatctggaagagccacttgtagccgtccgggatgctggagaccggcgggttgtagcccatgaacatgaggaagatggagtcgaagagcgacccccagacggcggccagctctatgctgggcatggcgaacgtaaagaactggccgaagtacgtctggaacaggatgtgcacggtcagcaccagccagtagaccacgacttgggcgaagccgccgtacgcggagaagccggccatcgggtagaacacgcccacgaagatcagcgacgcgatagctgcgcacgggatctccactaccgaggaggcggcgaagtaccagagcgcaccgtacgtttcggacgagcgctcacggtagaacggcccgcgctcttcgaaggcaagcggaagcacgtggacgtaggcgccgacgccgagaaagcacgtggagaagaagatgagtccgaccgctccgttggcgccttgatacgaggtgaagtcgttgctacccgagtacaccaaaccgaacatcaacccgagagtaaacgctgtcaccatgcgcgtgaacgtgtagaagggagtgcgccagtacagccgagcaaagcggcgtagcagcatggtgaactgcagtccatcgctcgcagctcggcgctgagcgaacgtcacgggcgccagtcggtcggacggcatgaacatccctggagccgcgcgcttggcatccagacgctgcttcagccgactggccttgtacgcagcgacgaaatccacactgtcgtcttggtgcagacgcgagatatccgagcacacggaggaagcttgcgacgcatcaagctgttgaagtcgagggtttctagctacaggaggcgcgggctgtcggaatctgaacggtagagttgacttcgttggggttttctcgacaccagcgccgatcacatccagcatccacgtggctggattgtcgccaggcttgaaggtcggtgcgctccggggaagacccaatccttggaagtagctcaccaaggtgtcaccacctgggcctatctcgccaaagaacaccgtctcgccaccgcgctgcagcagcagaagcgagtcaaatagcaggaagacctccgtggacggttggtggatggtacagatgacggtgcgccccgagtccgccaccttgcggactccgtccatgagagacttggcagctcgagcgtccagcccactggtcggttcgtcgaggaacagcacactaggctgagctgcgagctccactccgagtgtcaaccgcttgagttgctcgctcgaactcccgcgaatgagctgcccagccacgtcactcagccccagtaggtccagacattcgtcgacgatctcttcaactcgctcgggggccacacgatcaccttgacgaagatacgccgaaaactgcagcgcctcacggaatgtcgacgcgtcggagtgcacatcggtctgttcgcagtatccggtgcatcgccgcacagccagctcggtggcatccactccgttcaacagcactctaccacgaagacatggagcgccgttcttcttgctgcctcctttgccactcttgcggccagccaacacatccatcagagtcgttttaccagctcctgtagagcccatcagcgcggtcatagtacccggcagcgcgtagcccgtgacgcccttcaatagctctcgcgtgaccatttccttgttcttgcctgctttggctcgggagtccacggaaactggacgaccaggagctccctcggcgcccggttggccctggccggcagggtctggaacggcatcagcaggcacagtgatgctgtatcgcaggtcttggaaggccagagtcaccggcggaacttcccattgaggcatcatgcgcaccaggatgtcgcccgggtcggtgccgacgccttgtgaggcgttgaacgagttactcgagtctccgttctcgcccagtacgccgcccttcggtggcaggaagtccgtcatgtcgctctccagcagatcgtcgtcatctccgtggggcgtggacagcattgcgtacgactccttcggttgtctcggtgtcgggatggtgtccgagtacgaagccggtagtggagggggcagcacagggaaggactcgtgacgacggtactccagcatcacgaacgacaggaccatactaccaacgtacactgccaggaggaaaacaaggcccaacatgatccacttggggtccgatggaacgtcatacagtccgagggagtactcgcccaaggtctggccctggtacgtcttgcagtagtcgatgccgccgtactcgcagacgtcgagttcactgctgcggtactgactcaccaaaatcccgcgcgacgcccaagcgagcggattgctccagtagatccaccgcatcgctgacggaagttgctcccgggacacggcaaagcccgcgaacaggatggagaacagtagcgccaacgtcgatgccggctgagcctcgtgcagggtcgggcacgcagcagccaggaagaagtactcgccgataaagaccaagatcgtcagcagcatgtacagcacaaacacgaggaagtgctcgacggtcgagacgaagccgctcatccagtacacgaggccgctgaagaggaaggcttcggtgactgcaagcgggatctgactagcacaagaggctagaacgtagctggacgtgcggtagaagttggctccgcgatgcttgtagaagacctcgcgcgcgtcgaagtacggcgccagcgtggctgattgaccgagtccgaggaagagcgcgcaggagaacacgacgcccagtgtcacctgcgagtcggccaggtcgatgccgtagtacatggagcctagcatcagccccacgagcagatccagcagcactcggccggcgaagaagactttgttgcgcacgaagagcttcagctggcgcttcatcaccgtccacgtgctgcgcaggtacgtctggcggaacggcggcaccttgagtagtgcctcctggtcgaagtacagcccccgctctccgttcttgctgtgcatctggctgtacgcctccgtgtcgttgtcgagctggtccagctcctccaccatcgcctcgtacatgggcgacatgatccacagatccgcgaactcgttggcactgcgtgggtgacgacgtcgtccaggcatcggcgcgtgcgattgctcgtactggatctgctgcggagacgccaagtcgcacaggaagtcagcgaggccacgctccggggggcacacgaagcccagcgcttcgaagtacgcctggatgtgcgcgcgaggtccgtggtagagcacctccccgtcagccagcagcagcacgttgtcgaacagagccaacacttcaggcgctggctgctgcagcgagatgaccaccgtttgtcgctgctgtctggccaggcggcgctgggcgttcaccacgtcgaaggcggcagagctgtccaagcccgtcgtgatatcgtccatgagcgacaccgcgtggggtccgaaggccatctcgcccgtcgtcacgcgcttcttctcgcctccagagacgcctcgactgcgctcgtcgcccacgatggtgccctgacagcgggtcaagccgagttcacgcgtgacagtcaccgggtcgcgctccccgccgagatacgtggtcgagagcgccagcggataatcgaacgccggcgacttggacacggtgccgacgggtctcgcgttggcgttgatggcgcagcactcgaaggcgaagtccagcgtctccttgacggtcatcacgggcaggtgcgtgtccagctgggacacgtacgccacgcactgcgggagttgtgtcttgagttcctgccgactcaagccgttgtacgacacctcgccgtccatagtcacgccttgcgcgctcacgtcgagtctgccgcctagcagcttgagcagcaccgacttgcccgatccggagcggccgagcagcagcgtcatggacccgggcgtgaaggcgcccgtcacgttcttgaggatctgtcgccgcacgaacgtcttggacgcggtgaggccggcggcgatggcgcgcaggtggttcgagatggtcggcagttgcttggccgccagcgtctcgcgccccatttgacccgaagccgcttgagctgcggccgccgcagcggcaggcgacaccgggacgtccacagcgagcgagacatggcggaacgtcacgaagagctcgggcactgcaccgacaggtcgacgaggcgtgaagggcgagtcgcgcggaccagctccgcctccgtgacgacgagagcctcggttgttgttgttgctgctgggctggtgacgccgcagcacgtgcttctggtaggagctggcgagcgacgactcgagaatgggcgtgggctcgctcgacacgctcgagatggacgtgctgaactgcatggacggcggcggcttggacttgcgcgagctgctcggcttcctcttgctgttgcgcgagttccggcgcgaaggtggcatcggtctcgccgagacaaacgtcgaatgagcaggaagacatcgatctcgccaccagacaagaaggaaggcagctcgctggattccatgggcgcatgacctcggcttgcctcgacttgacttcgctcgatttactactgcccgacacgacgtggtagtgcacctccaagccagtcaacaccatggagcagccatccaacttggaacgagcacctcgccatccaacttggaacgagcacctcgccatcaacgaccgccttgaaagaaggagctccatctcacctgtcatgaagacacgtgatggggggactcaccgacgatgacaccagcatccagcaaagggtactattccacattctacataacaatcactacagggtataagtaagcaggaagaatcccactacctccgtatcatacagcgttggcgaaggccgtggcttcgactgagacgggctttgatgctgccgtcggggtgggggccgtgtccgctgccatggcgccctcgcgcttctcctcctccgcgagcccgagcacgtacttgcgcgtgtagatccccaccaccgccagcagcagcagcgcgctgcccgcgcccacgagcagcagcaccatctcggtgctatgcctcgaggccgtggggctggccagcagcgccgtgaagttctccaccgcgtggcccgagtagacccagatgaccgagaagggcagccccgtgagcagcgcggccgcgaagaagacggggaactgcacgtccagcacgctgagcccgtagttcttgacggcgatggggaagaaggccacgcgcgtgaggaacacgaccagcacctggcgcttgcgcagcaggctctggaagccctgcagcgccgggtggccgcgcgccatgtaggcgtgcacgcgccggcggcacaggtagcggccgatggcgtacgacagcacggagcccacgagcttgcccgccgtggccagcaacagccccagccagaagccgaagatgtagccggccaacagctcgaaggccgtggacgggaagcacagcaccacgaagcccgtgaagctgcccacgtacagcgcggcgcccagcgcctcgtgcgtctgcagccagcgcaccaccaggtcgaagtcgtcgctgcgcacgaagcggaagagcagcattcccgccgtcaggccaagcgccgcgacccccacggccgccagcacgcggcgaacgcgcacgcgaggagagcgagcgcgcgcgccgggcgagggctgcgctaacgtctgcagcttggccgcctccacgtccacgggcgcgtacatcggagcgaggtgaaggtgttgttacgctacagctcgctgagtcgtgcgcagcgccgtggtaagttggggactccagcactgctgctggatggaaatcctatggcgagagggcgacatatttttactggttgggcagctgcccgcagcatactgtaatcaagatgtctggtcacgcacgaaaacatatggatgacctgtctctggcgttcgtaccgcacgttttgtgaaataatttgatcgtcaaatatcctgttatcgactgtaaggtcttttacgcatccgacgtatcccgtaaagtatccagtatacttattgggtgcatttaatcgagaggatgacggctcacagcaagacacaggacaggatggactggctgaagaagaagaaggaggcggcgcagcaggccgcggccaagatctccaacaagcgcacggccttccgcggccagggcaacgtgctgggcggcggcgatgacgcttctgctgctgctgcgcccgccgcacccgcgtcccgaggcccctccatcaaggtgggagcttgctgcccgctgccttgttcaacgcccgcaccttcctctccagcctctaacgcgctcttctgatcgacccgccaatagctcccatttaccagcaacaagccgccggccctgagcgaggaggagcagcagaagcggcgcgagctgcaggttcgtgcacagacttgaagctgctgtactagactgtggatcaacaacccactgacatgccccctccgtgacaggccaaggcgctggagcagcgcggcaacgcatgggagaagcgcgtggctaacgcgcgcaaggtgcgacttcagcaggaggacgagcgcgagaacaagttcctggacgcgccaccgacgtccgcgtcggaggcggcggcggcgccggcaggtccgccgcccgtcgtgctctccaacgacgaagtgaaggcgcgcgagctgcagagcgcgcaccaacagatgggcttcaacccgtacgccgcgacgttctcgtcctcgacgcaggcggtcaccgccatgaacgccatcagcacaggagctcctccgcctccggctcctgctggcaacagcagtgttatgccgcctcccgcgcccttcccagcgattcctcaagtcgcggcacctaatggtgcaatgtcggacttggaggcagcggagaacggtgctgtctacgtgctgctgcggcaagacccagcacgcgccatcacagcggcggaaacgctcatcaagatgttgacgaacgtcgtgaagaacccgcaggtagggcgctattccgtgatactttatgcggagaagctatttgggttctgagtgtgttattgttattaactgccacgttgcaggaggaaaagttccgcaaggctcggctctcgaacgcagccatccagtccaagctggtggctgtgcccggagctgtggacattctcgctgaagccgggtttaccaggatggagctcgacggggaagtctatttaatgctgacggccgatgcgttccaggcggagcgcgtgcagtccgccatcgaccgcacggaggtcgcgctgattcaactccagcacgattctgcgtagacataaaacgcagcgataccgagtctcgtgaacaagatggcattgctgctaatgtgttactcatcatgtgtgtatgctggtttaatgtgaggcctcgcattgacggctccttggtgattaacttgcctgtagctgtcatcaacaacggattcaagtttggtcaagggcagtatgaaaagaaaaacttgttgagaggagcgaaagctttgtcgtaaaaaaaaagttgctacaccgcccaatctaccttctggggttagaccagcgcggcaaccacggcagcaagcactacaatcgcagcgcaggtggagagagtgggggcttcgtttccaggcgcctttgacgccgaaccagttcgaggattcgccggactattcgtacgtggcttgcttgtcgccggcgacttcgttgccgatccaccaccaccgacgtctccagccatgggtcccgatccagatgccgatccactgacatcaccaaccgagggtcctgcaccagatcctgacgcactgaccgatccagcggaaccggccgatcgagtcttattcgcgcagcgctgcaggatcggatcgatgatatttgcgtgtagaaggataggcccgatcgtgcattcggttggggcgacttgcttcagcgcgcccagtgacttcatgcaggcgttgttgttgcacacggcagtgacctgcgcgtcggagggcggttccaacgacgcggagctgtttccgaacatggcgctgcaagctctcacgtctccagtaccgagaagctgggtcatcgccgtgccgttgcacggtggtgcaacggcagcagcagcaccaaacgcagcggccagacacagaaccagcacggcgatcttcattttggggtgcggaaggttgagtgcgaccggaacggagaaagcgaatctgagcgacgcgatacagcagttgcagttgagtgggactctcctccagttgaggcagttggacacgagtacagtctccaagtgattttctcgtgcaagttggtgggacgaggtgccatctcagttgggaaagtgagagcttctcgtcattatcaaataggatgcggaggtgtctcgacactattttgcagatacaacacccaagtgagagcgaagaagactgggtcatttgatctctcaaattgccgatcttgcacacgaaacgacgccaaaacgtcgtgtgattggtcaatgaacttgaagttcacgattgacttcttgctatggagactggtgggggagtcactcaagatcgcgccgccatgaaccgagaagacgacgatgcagctccatacgaggaccaggacgacacggcgtccactgtgaacggcgatgaaagccagcagccttctgatgaagagtccaacatccgcatcttcctgcgcgtgaagccgtcccggaagccctcgggcttcttctcgtgggacgaagacaccaacatgatgaagtacgacatccccaaggacgtggccgcggggctcatcaacaactcccgaacctcctacaagttccgcttcgactcggtcatcggcatggaagccaagcaggaagaagtgttcgaccgcgtgggtcggccctgtgtggagagtgcgctgaacggcttcaactcgactgtgttcgcctacggtcagacaggttccggtaagaccttcaccattacgggcggggccgagaggtacgaggatcgaggtctcatcccgcgcgcgttgtccctgatcttcgagcggatgcgcaacactagccaggagcagatcatcgctcacgtctcgtacctcgagatctacaacaaccagggctacgacctgctggacccgaaccacgagtccaccaagtcgctggaggatctgccgcgcgtggccatgctggaggacgaagacggcaactgtcacctgcgcaacttgtcgatgcacccagtgaccacggaggaggacgcactcaatttgctgtttctaggagacacgaaccgcgcggtgagcgagacggcaatgaacttggcgtcttcgcgatcgcactgtatcttcacagtgtctttggagacgcggagggtggggagcgaggtggtgttgcgctccaagctgcatctggtggatctggccgggtcggagcgagcgcacaagactggcgcgaaaggacagctactgcgcgaagctgcgtacattaacacgagcctgcactaccttgagatggtcattgtggcgctgcacgagaagaacacgaagggcaggacgcacattccgtaccgcaactccatgatgacttccgtgctgcgtgactcactcggagggaactgtaagacagtcatggtggctactgtgagcccggaaaaggaccaaactgacgtgagtttcactgcgaaagccacgatattttagcgcattctgacactgctctcttgtgctgttgagtaggaatccgtgtcgacgtgtcggtttgcgcagcgagtggcgcgtgtcaagaacgacgctcgtctgaacgaggaagtcgacccggctgtgatcattcgacagctcaaggcacgagttgctaccctcgaggaagaattagccactctcaagggcgatgtggtacgtgattctccccagttcatgagcttatctattccagtgctgactctcgaagaacttttggttgatcagaacgaaggcgcggagctgaaggattacgagatcgataaactacggcaaaagtgcttgaactttgtgaacgactcggagccgagcgctcatttgtcgatgggcgagttcacgtacaccaaaatgaaggcgtgctttgacattctcaagagcatggcgaacgccgctggcgccgctgcagcttccggtggtggtggtggtagtagtagtagtggtggtggctctggaatacccggggcacccagtggcgtaaaactcatctctgcgggtaatggaggcaacaaccaggagatggagcagcgcgtccacgagctcgagcagctcgtccagcagcgtgacaacgagatcgctatcatggtcaacatgatccggaaagagcacggggcaacaatccccgcagagcttctgtctcgtgggactaccgagtacgcaagcaaccaggacgaacaccaccaaaaaccacggaagaagcagagcgcacctgcagccaccaaacctcccggtgactacgcgtcgacgttcgtggttgatccagcaatactagaagaccctgccaaggcatttgaagcgttcaaggcgcagtacccgaagaacgatgccatccgagacaacaaaatcgccctcaagcgcaaatacgacgctgccaaggctttggctagcgaggtcaacgaggcgcgcaaccagatcaaggcgctgacgctaaagattgagaagctccggaagcagcaggccatcgctgacgagggtcttatcgatgagggtggagacagcggcgacgcgtcttccgcagccgcggcaaaggctcgagcggaggcggaggccgccgagcagaagctgaaagatcagatcgacggacacaaagtcgcctacaagaagggcttcaacgagctcagcgagctgaagaaggagatccagcacatccagaagatgctcgaaatggggcgcatcaagctccagaaggacttcgacctgtggtaccagcggcagggcaaaggcgcgctgctcacagagacgctgctggcggcgcaggcaaagcctgaaccaactcgacccagcaacaacaggagtccaagctctgagaatcttagagaccccgtcaagtcgtcgtcccctgaaagacccgaaagcgcgtctcgcaagtcggagtcaaaagcattcagcgatcccaagagagcgtcttcctcgcactcgcagcggtcctcagttgcaaggcaaagcacctcaaggtatcctacgtccaattgtcgttggcggtgatgttcaaagtgtgtaatactcacgttgttgtgtgtgttgtgtgcagtaccgtcgaggaggacgtgtctgggttctacgaagccttggacatcctcaagcgccgcagcaatgctcggaagtaatatgtagccctactgtagcaaatcttgacaaccatgtatacttgctgtataccaagttgaggtggtcggtcaatcactcttaaccgcctgtgattggctgaaatagtgtgccttccccccattggccgaaacggaaagccgccagccagccagccatacttctgcaggcacaaccattttagcagcatcgtcctaccgtagcaccctgtagccatgcagagcggcgggcgcgcgcggcgcaacccgcttgtgaagcagctcgtgctggagaacgaccggccggccaagatcagccacctgaacttcgggctgctctcggacgtggacatgatgcagatgtcggagctgcgcgtgcactccaaggacctgttcaaggtgcagacgcgcgagccggcggccgacggcgtgctggacaagcgcctgggcgtgtccaacaagaaggacacgtgcgacacgtgccacctcaagctggcggactgcgttggccacttcggctacatcaagctggagctgccggtcttccacatcggctacttcaaggccatcaccgagatcctgcagaacatctgcaagtcgtgcagccgcgtgctgctgccgcccgccgagcgcgagaccttcctgcgccgcatgcgcgaccccagggccgacgtgctgcgcctcgtggggctgcgcaagaagatcgcggcgctctgcaagaagaccatcaagtgcccgtactgcgacgccatcaacggctccgtgcgcaagatcaccagcaccacgctcaagctcgtgcacgagaagtaccgcgccaaggccacgcacgacctgcgcaacgtgttcgtggcgcagttcgccgaggcgcaggccaacaacccggagatcggcgcgcacctgcccaaggcgcaggaggacctgagcccgcttgtggtgctgcagctcttcaaggagatcccggaccaggactgcgagctgctctgggtggacgcggataacggccgccccgagcggctgatcctcaactcggtgcttgtgccgcccgtgtgcatccgcccctccgtggccatggacggcggctccggcagcaacgaggacgacatcacggtcaagctgcaggagatcgtgcaggtcaacttcgccctgcgtgcggcgctacagaagggcgcgtcgctcaagatggtcatggaggactgggactttctgcagattcaggtggcgcagctcatgaacggcgacacccccggactcgtcaagccgcccggagccaagagcggcatccgaggactgtgccagcgcctcaagggcaagcagggtcgcttccgtggtaacctgtcgggcaagcgtgtggacttttccggtcgtaccgtcatttcgcccgacccgaacctgcgcattgatcaagtgggcgtccccgagcatgtggccaagacgatgacgtatccggagaaggtcacgcgctacaacattgagaagctgcgcaagtgcgtcgtgaacggaccgaacgtgcaccctggagcgaatatcatccgcattgaagggcaaaagtttacgaagaacctgatgtacggcgaccgcgcgagtctggctgacgagctcaagattggtgacatcgtggagcgtcacatggaggacggcgacatcgtgctgttcaaccgtcagccttcgcttcacaaaatgtccattatgtcccaccgtgtgaaggtgatgccgtggaggacgttccggttcaacgagtgtgtgtgttcgccgtacaacgccgatttcgatggtgacgagatgaacatgcatctgccgcagacggaggaggcgcgtaccgaggctattacgctcatgggtgtggagcagaaccttatcacaccccgtaacggtgagccgctggttgcagcgacgcaggatttccttacggcgtcgtacttgttgacgcaaaagaacattttcttcaaccgcgagcaattctgccaggtgatttccatcatgagtgatgcgaacgagcacattgagctgcccctgcccgcgatcgtgctccctgtgcgcctgtggacgggaaagcaggtgatcagtcttttggtgaaacccaactcgcagacgaaggtgatggcgaacctggagctcaaggagcgcaattacacgaacaacaagtacatgtgctggaaggacggttacgtctgcttcaggaacagcgagctgatctgtggcaacctgggcaagaagacgttgggtgacggtagtaagcagggtctgttctacgttctgattcgtgaccacggctctcacgaggctgcgcgctgcatgaacaggctggctaagttgtgcgcgcgctggctgggcaactttaaggggttctcgattggtattgatgacgtcacgccttcggaggagcttgccaaggaaaaggaaaagctgttgcaggctggttacgacgcagcaaacaactccattgaggaataccgacgtggcaagctttccttgaagcctggatgtaacgctattcagtcgctggagagtgaactcaacggtctcctcggtaaactgcgtgagactgcaggtgctgagtgtatgcgcacgttgccattccacaacaacccgcgtatcatggctgaatgtggctctaagggtagcgcactaaatatctcgcagatgatggcgtgtgtgggtcagcagtctgtgggcggcaagcgtgtcccggagggcttcgtgaaccgcacgctgcctcacttcctccctcacgctctgcacgcctctgccaagggttttgtggccaactcgttctacagcggactgacggctaccgagttcttcttccatacaatgggaggacgtgaaggtttggtcgatactgctgtgaagacggccgagactggatacatggcccgtcgtctcatgaaggctttggaggacttgtcttgccagtacgaccagactgtgcgcaactccgaaggctccgtggtgcagttcacgttcggtgatgatggcctgaacccagcgtacatggaaggcgatgaccgaccggttgacttccatcgcctgctggagcacatccgtaacacattgcccgaccgtgagtccccggcgttgctgccattcgagctgcgtcgcctgggtaagcaggtcgtgcagcgccctcagttccaggctattctgccgaccggtcggaagttcttgattgagatcgaagagtttttgggctccgtcgcgagtgaaatcgcctcgaaccgcacgggctgtggccttgactcgatggacaaggcggtgaagacgtacgcttctaagctcgagaaggctttcgacgacgatgaggcggccagtgtgctcaagaccaagtcggagactggtgacatgaagaaggagaagaaaattcaagtgtcgactaagctggagaagcttgctaagcctcaaggccgtcgccgcttggtaaagcccgaggctgagtccgacgacgacacagaggactcggatgaggacatgagcatggacctgaccacgtacaagcagaaggggctggacaaggtcggcctgccggaatgggagcgcactcgcttcaaaactgcgaaggctcgtgctgagtggaccaagcgcgcaggcaagaacggcactgctgagaaggaggaggccgcttggctgttgtcgcacaacgtgtgccgcattacggcgaagcaggtggagaagctgctagaggtctctctgtacaagtacaaccgtgcgggtatggagcccggtgaggctgtgggtgccgtgggtgcccagtcgatctcggagcctggtacgcagatgacgctgaagacgttccactttgccggtgttgccagcatgaacgtgacgctcggtgtgccgcgtctcaaggagattattaacgcctccaaggtcatcagtacgcccattatcacagcggcgttggtgtgcaagacggacgagcgctcggcgcgtatcgtgaagggccggattgagaagacgacgctgggtgaaatcgctgtgcacatcaaggaggtgttcgcccgcgaccaggcctacctttccgtgaagctggacctgacggccatcgagcagctgcatctgaacatcacggcgcgatctgtgcgcaacagcatcctgaacgccgtcggcgtgggtccgcgtggcgcgttgcggctactgaaggagcagcacgttcttctgaacgcgcgctgccccgacaaactgcgtctgttggcgcctcccaactacaagggagccaagggcgactcgcgcggtgcctacttcgctctgcaggcgctcaaggctgaacttcctggcgtgattgtgcagggtatcccgacggtgaaccgcgccgtgatcaactacgaggaggtgcaggatgcgagcgcgaccaagtcgctccacttgctggtggaaggttacggtctcgccgaagtgatgggtatcccgggtgtcgacggccttcacacgacctcgaaccacatcattgaggtggaaaagacgcttggtatcgaggcggcgcgtgagctcatcagctccgaagtgaactacatcatgagcgcgtacggtatcggtatcgacagacgtcacttaatgctgctgtcggatatcatgacgttcaagggcgaagtgctgggtatcacgcgcttcggtatcgccaagatgaaggagagcgtgctcatgctggcgtcgttcgagaagacgaccgaccacctcttcgacgctgccgtgcactcacgcacggacgctatcgtgggtgtgagtgagtgcattatcatgggtatcccgatcccgctgggcacgggcatcttcaagttgctgcgccaggtcgagaagccgcgcgtgcagcagcggcggccgcttctgtccgctcagctttagactcaaacatcaatgggggcagaccgacgatcatactaaggaaaaggataagaaggttttgtagtctcgctgcctgcatacactacgcattgtaactgtttactactcactgttgatggagaatcttctcagtccggtcttctgtgttgctggcggttgccattcttctgctctcggcgcttccctcgtcctttgcgcagcagatcgtccgcgagtcgctcgagaacctggtgcagtgtgaagtggggcagttggcactcgcctggaggcttggggcaacgcattggagcgtacagatccgcgatggtaggagccgatggcggggcgttctcttcgccgcagaacgcgtagctcagcgtcacctgtaccggtcgattcagcatctcgaagttctcgcgcgcagccttcttgagcacttcggtgtagttctcgaacttccaccgcttcgccttggctggtttcttcggtcctccgacttgctccaccagacgcagatgcatgtgctcgcagctctcgcccttggagatctgtggacactgcccctccaagaagaacatgacgcagtacatacccgtcttgtaagtgtacgggatacggtctggcagattccacgacggcaacacggagtatgctggcggcatggagtcagacgcgggtggcactgctgctgctccgttctcccgtcttggcatgaaaccatacagatcaaccacaggagtctcgatgccaggctcagcagtagccatcagcacctccacgccaccccgtcgtttgccgaaagtgctggacccaatcgcatcgtgtggacgtaggagatagtttcccacagggatgtcacccaacgcagtgagcagagtggacaaccactggaattttgccgcgggactggaaataacaagaaacgacacacagttagttcgtcctccattcatacgctactgtagaaatgctcaaacttactcgaagcactcgagcggaacagtttgctgagtcttctcgccatagatgagcgatcccggcgaatacgtcttccaggaggtgacgacttccttcttggggttgactcgcgcgacgagaacggtggagccaccgcgaagccacgagtggagccagaaacgacatctctcgctcgttgttagctgctcctcgactcccagcaagttgtaatctggcttacaaaaaacactgagaggcacaacagtacgcttactgtgctgctgctcagaggcgctctcagctgctggagctgctgaaatggtgcccgcgtgcatcgtgctgcgcactaaaattcgcttgccatcaagttgccagatatggtacgacgtgcgtcctcctgttgagccttgaacaatcgaatcagtctacagcagaacacgttagaaccatactggtgtttcctgctaaaattgctcaatattcccacctcgaagcgtgacagcaatgtcgctcttccagcttctgctaacttctctcgtgtgcttggcctgctacctggtagcgggcggtccaagaagatacgtttcttggatgctcctccatgaatgatcgctcgacttttcattgggatgccccagccagcaggctgcataccccaaacatttcacaagttagcacatacagacacgactgtctcggcactttgcagtctacttaccacatgagcgaaacgagtcgatgtatcactgtcaaaaagtgtgaccaacgtagatgacgagatggcgaagtcgcagtcgtacttctccatcaactcttctgcttgcaagtcagcggaaatgacctggcgcggagacaccacttccagcgccaacccgtcactctcatctgctgaagtcttcagcggttgaccaggcaaaagtttctgcaggtctacagcacagcatgagcctcgagcagcaacttccttagccttaattgcgcccgacccattggcagtcagagcaccaccgctcgggagttgcactaccgcacacggctcaaaccagcgtggataaagacggtagatatcattccagcactgcgtcagcatcgcctcatactgcccaacaaacacacacagatgacgtgagctctagcctctcgtctgtcccctcactagcaacgcacgtacccaagacatcgcaaacgctggcacctgcatctcattagcagcagcttcagcggctaaggccctcgccatcatcctgcaaaagttcacttgctcatacgcaacgtctgctttcatctgtttccactgcttggcctcatccgccgaaagtgccagcacctccggcaatccgcgctacagacatacaaacacaataaggtcgccacccagctccgtcagcatctccagctccgtccccactccggctatagtcaaaaatcacctatgccgcacctgttgagcctggaagagcttgcgttgcagcatcaggtagcgctcatgttcggccaccgaaattccggagactcgtcgccgcgcgttgtcgagttctaacattttctctgggcgctggatgcggttggcctcgatggcctccagcaagagcagcatcaggtgcttcgtttgcttcttgatagtcgcagttgcagagcttttccgaccagaagtgggcgccaccgacgtgacaatggtccgtcgccgagtctccagttccccatagaggcgcgacgtcaggacgtccccgcggacggaaaatgcttcgaagtcctcggcagtgaagaaggaggaaccgtcgttagcggtggtagcttcagggcggcgcttgcggccggctaagagccgccgcgggacggcgaaggcagtcgacgggcagtccgcgagccttggcgttgtgtccatttaggcctaaaatgataattggggtgtagtagccaatcagacgaggagaatgttcagccaaatcgtcgatcggcgcgcttgagcagctccatcacttccagcacccccatgccaaatgccacactcacagaccagagtcttatgagccatttcagactgcgccgccttgtcaggagcgactggccttcgcactgcagcaaaccgtgaagcaaagcgacttggcagttgggccttgcgtgcttttcctcaagcctgcatcatgcgggacgaggtggtattccaactgccacgacactgccacaagaagacgagatgtctcggtactcgcgctcggaccgtggaggctacggctacgatgtcgacaggggccactcaagaggcagcagacacgcgcacagctctcgtcggagccgccgctcccccagtgagtcttcctggtcccgcaatgttcgtcagcgccgctcgtatcacgaccgtcgcagccgatcgccaagccctgtgtttacacgacgatacgaaaaccagtacgattctggctggaacgccgccccgagctacgattcgcgtgggcatcgtgggagtagcccgagtccggagcggaggagtcatggcagcggcggcgatcgatgctacgatgacaactactatggctatgaatacgacgactgccggtatgatgatcagagacgacgatcgtgtcgaagccgctcgcgcccccgccaccacgcagagcagtcgactcgtcatgagcgtcgcagtcattcgcgcgaccgggtgagacgaagtcgcagtccagaccggcgaggccgcactggccgcgatggcgtgcgacgcccactacggctacaatgatcgagacgctcgagttcggcgtccgtctcgtagtcgctcacgccctcgccaccacactcagcactcgagtcgccgtgagcgtgaggtgtcagtcgtgactcgcagctcgcgatcgggtagcgaccagcggccagttgctcacgcacctccgcccgatgaaggccaggctgatcccgagtgggagggcagcacgcagccgctcgagacgaagagcgatgacccgtacctgtgcgctgacgttgctctctcaagtcgagcaggagctggcggcagtgggaacgcgcagcgtctcaagtcgaactgctacaaggtcgcggtggaccctgtcaagtgtccgaagatttaccagtaccatgtcgcgatcgagatgggaggcgaagtaggcggagacaagcagaagttctgtgggcggccgttgatgcggccgcttctgaggcaggtgatgcagaacgcaattgagcagaaccagaatttattcgggcagatcctggtagtgcacgacggagccaacgcgttgttcacgcccgcagcactgccgctgtcgagcgagaccgaggtgttggacgtgcgttcggctgcgagaaacgggtatggaatcgacccgcctggagtggcgaagggaaagtctcggtcgtttgctgttcgcattcgtctggtcaaggagatcgaaatgaacacgctgcaggaggcgtttacgagtccgacagtggagatcaagccactcgtgtacgcgctgaacgcagtaatgaaggctggactggttggcagtcgcgtggagtgtcgtgggaatctctgttcacgaattgatgctttggacatgaatggaggctgggtgctctacaaagggcaccaccaaactgtacgcctcggtgccggttctctagtgctgaatcttgacagagtgtggagggagttctacgctgagggcccgctgcttcagatcgtcggtgacgcgttgggcagtcgacactatgacagcatccgccttggcgacctgcaggaaactttcaaactcgcccgtgaagttaagaagttggtggtgcgagtgacgcaacgagtcacaaacctcaatgagattatgggggtgtccgagtcgtccgcacggtcgacaatgataaacgttgatggaaatcccgtgtcggtggaacagtacttcgtggatcgctatcacattcggctgcgctatccgaatctgcctccagtgaacctcggcagaagaaaggctggtacggagagctgggtcccgatagagctgtgtgaggtggcccctggtcagccctactgtgggcccgatcgctccaacacgactgcgatccgcacccaagctgtggtcaagccacacgtccgaatgaacggcatccagcggcttcgtgactcgttcaactttgagaatgaccctttcctccgagcttttgggctttcagtcgctgagcgaatggagggggtcggtgcgcgggtgctggccgcccctgacattcagtatgggaatggtgtgcatcgtccaagaaacggcaattggaatttgcaggacaagacgtttgtgaagccatgtacgctctcgaactggggcgtcgtcatctgcagcagtatgaatggcagctatccgtgcgtgaaccgccaagccgcggaacggtttgtagctagcgctggggtcgctctccgacacgtcgacggactgctcctcgacgtcgtccaacatggcgtccacgtacacgctcgcggggctcagtgacaagctggggggagtcatgttcttcgtctaagcgacagcaacgtgaggtattttatattttttatttttcattgcaagttgaagttgtaagttatttatatcttgctggtctcttctaagattagcttgactggagtcgttgtcgtcgatgcccttcagacccgcaagactcgcctctcgcctggccgctgttccatggacgacggcaggaggatgactgcgaacgcgaacgcctcagcgcctgcctcgtcctcgggcgggggctccccgacgcccgagctcgccagcatcaaggtcttctgccgcctgcgccagcagaaccagctcgagaagcgcgagatggccgtgcagtggtgcgtgcagtagtctgtcgtcaatgggctctatctatgattgggtgggtgctgatctattgtctgctgcagtacgaccgtggtggggggacggaccatgttcctgcgcaacgagcgctgcgaggtggacgagatccgctgcacgttcgaccgcgtcttcgacatcaactcgacgcaggaggaggtctacgcccacacggctaaaccgctcctccacgagttcctgcagggctacaactggtaagcgagagagagaggtgtgctggcagcctgcttcactctcctagtactcactgtgtgcctctctctctatttaatggacagcaccatcttcgcctacggacaaacgggctccggcaagacgcacacgatcttggggcccaaggacggcgtgctcgtgagcgccgacgaggagggcggcatcatctcgcgcgtggccaaggacctgtacgaggaggtggagcgagccaagacggaccccatcgagctcaacgtgtcgttcgtggagatctacatggagcagatccgcgacctgctcagccccagcagcagcagtggcaacatcggggcgccgacgaacggaggactcaagatccgcgagagcgcgcagcacggcgtgtacgtggaggagatgacgcgcatcccgagcaagtccgaagccgccatgatggagctggtcaagagcggcacgctcagtcgcgccgtatcctccacgcgcatgaacaaggactcgagtcgcagtcacacgatcctcatgatctcctgcgttcggcccgtgagcggacgacgcgccacgatgtacatcgttgatcttgcaggctcggagctcgtgaacaagacgaacgccagcggtcgagtgctgcaggaagccaaagccatcaacaagtcgctctcggctctcagcaacgtcatcaaggctcttggagaaggcaagcgtcatgtgccctatcgcgactcgaagctcacgcgtctgctgcaagactcgcttggaggcactgccaagacgtgcctcatcctggcggcctcgtgcagctcgtacaacatggccgagaccatctccacgctccgctttggactgcgcgccaaggagatcaagaaccccgttattcagcggaccgatggcggagagggtggcgctggcttcgccacgggcatcatcttcaaggagctctaccagcgagcgatggaggatatggaggccaagaaccgcaagatcgacgagctccagagactgttagctgcaaagtaccaggagaatcagcaccccgacgaagcggagctagctgcgaacagcctcgcgacggcagctgtgcaagacgctggcaagccccaggacacggacgcctcggacggtgaccactccagccaagaaggcgacaacgaagaggaggacggtgagagtgccgacgacgatgaagagggtgatgacgaagacaacgacccggcacagacggacgccaagaacattaccaagctcgagctcgcgaaccaagcgctccaggaagaaaacaagcggctgtttggcgtgctggaaacactcgagaagaagctcgacgaggtgacggtggatctgtccacgggcaggccgatactaactctttcaagcgagcgccaaggcgccagcgaagaggatagcgcggaaatgcgagaagctgcggcggcgccttcgctcaaggtttggttggagagtgataactggcggaaatccctcgagtcccgatccgagcgccaagaagcggcaagtcctgctaagcaacagcggtcacagacgtcagaagtcaaggaatcgcctggtgtgacggatatattacctcaggcacctctagagaccctgaaagccccgccagccttgaatgaaatgaccggagccgtgttaccgtcgctgcagggggcaatgccaccttgctccaagcccgactgcgtgcatcatgctgacgccgaagcactctctcggcagattgtggagttgaagcttcagctgcattatctgacggagaacgcgcgactgtcgctcagcggagagagctacaacatcatgatcgagaacgcccggctgaagacgaggatcgaggagctcgagttccaggcgaacctgtgcaacgtcgcgtgtagccagctcgagatgaagaaccgcgcgtgcgagacgcgactgagcaaccaggagacgcacatcggctgtctgcagaactcgctgcaggagtaccaaggtcttttcaagcagcagatcattatgtcgcaggagaagtgccgcctgctcacggacgagctcgaattctacaagaagctggccaggtgcagccaggagagttaccagcatctcggcggtggcggtaactctcccggtcgccgcaacaaaggcagaagccccagtccgcgtaaaaccgccagcaacggaggagcctccagctttccatcgctctcgctcctcgcccgtgacggcgtgagcgtagcaccgagcgacccgccgcagtctccatcgtcagtgtggccaagcttcgggtcgctgtccaggtccagcagcgccggctccgatgtcacgctgactgcaagggcgcggcagttcatcgtcaagccgacgggggaaagagctgcgggcatcgccgaccctacagagcagtggcagaagacaagtagtgtggaggacctgagcctgagcctggacgagttggctcagtccgccacgcttcccgcctcgcccgtcacgtcccctcctcctccttgcagtaagtagccaccaccagcagctgaatatgaatatacacgatacagtttcaagcttttcctctgcaacgcggccctgtggcctctgtggattgattgcacccttcctgcgtcgtctagtgctcgcccgaggactggctgttggcggccgagggcagcttcttctgcgtcttctgctcgtactgcgcgggcgtccacgtcttcatctgcagcgcgtggatgcgcgtcatctcctccttgaggcagtcgttcacccggcgctggcgctccagcagcgactggcctgcagcagcaggagagagaaaacggtgctacggttagtgctgcttgttatggttacgccattcccctcaacgactggcccaccgaccttcgaagccctcgtgcaccaccacgaggctgaacttgctgccgcagccgtcggacaggtccacggcctccaccagcgccgcgccgatctcctggcggatcttggtctccagctgagcaggcgtcaccacgtccatcgtcctcgtcttgcgctcgatgagtgagtgactcacaaaagaatacagttacttcggtacgcaggaccggtgtgtcccggaatatttgtaaaagagagccaaattgactcgattgcatacctacttactgttgatacagtactcgactgcactgacatccattatccatttacattggtgatgaaatctgtgctgtcacgagaatctgacggtcgctcgggcgacatgagcacaggaatcgcgcaaaagtgcgcgttgttcgtctgcatcccggacgcctcaaaggttgcaacccggtctcggtctttgacgaacgtctcgacgttgtgagtcaggaaagaaaccgagtagccgacgagcgtcaaaatgcagccgagttgtgctgctgctcgcatctgcgtggccgagaagtcttgctctggacggcaaaacaaacaataccatagctgtcagcaatgcacgcgtgctacagcgctcaaaggtgactcgggcgcaccataattccaaagcctcgtgtgaacatcatcatacttcatcgtcactcggcagtactcttgacccagatcgcgttccaagcactgcaaacaccagcaggtaacttagaagaatcgctcaagagctaacgacgagattcagtaaacactcacctggtcgatggtgagtcgtttgaacggctggacaacgctgagaccgatcggcaagtacagcaggaaggccacgaagaacagggcgctgcagacagcttgaagccgaaacgttcgccgcatgcctcggagttttgtgtcagcgtcgatgtcctcaaaatcgcagatcaccgggatttcccctgccgtcgtttcaggaaccttggcgctttgaacaagcttgtggctgacgtaagtctgttgtatccgcggacacaagtcgtgtgagcttggtcatgaccgctaaaagtttgtcaatccgaggtgatacgaacattgagaaagatagcgatggtttctaacaggaagaaccagtacgcagcgttgttgtgtagtgacgggtatgaagacgtgctgaagaaagcctacggtaggagtgaaaacgttcccttcagcgacatcaccgctatgatcatttgcaccctcaagctgtcacgtaccagtatcggtagtccgatggtggagataataccaatgaaagtgcacgcccttgcagtccacagcacgaagcgtgacacgtaaccgagcagcgtggggagccgtagtgccgagctctggaactggtaattgaagtaccaagtagcgcacagtgcagtcgccacaatggtaagaccgacgcagaacatatagtagcctggtgagtctgcattcatgggcagcacacaagggtcagacaccacgcagcaagcggccagagcattggttgtttaacgcaccacgacccaggtcggagaagtagggccacgtgagaccgcccgtgtaaaagttgttcgccttggcgatcactagacaggtgacgagcgtgaggatcactgtgccagacgctaccacgggcgcggcacggcgcaagtgccgtgtcgcgattcccatgcccctctcactaacgtcaacgtccgagcttctcaactctgatcaccggagcgtcagcgtagccgccgcggtaggcggttgtacttgcacgagcagaataagacgccacgacgcacaagtcctccgtcaacactctgcgaaaccatcgccagatgccggggttgcgcttggcagactcaacacgcaacgcttagccgaaacctccggcgacactcgctccacctgtacgccgtccacggacgcagctaacagccgacgccagctcaccacctctttcatcggtcgagccccacaaatagtccaaccgtagccgaggcgttgtatgtgtcaaaagctcacattttgtggttattttgtttgtttctgctcgccctacagcgattaaatacgttccgggcctcgtgatactatgatggagtatcgctctctctctctcgctctcggctcacagcctgctggcgctcttggtcacaaagtagttggccatggcgttcgcgtaggacgcgtccgtggcatccgtgcagcggtcggcgcgctcagccttgtggtccgtgggcagcatgcggtgcgcgctgcggttctcgcctgagatgcgcgtcctgtcgtagatggagcgctggctgtgcgccacctgcagcagcgcctcgtccagcagcctctcgtgccgcgacaccggcatactgtgcgtgcgcgagtagcgcggcgcctcgccgaagtgcttggccatgttgcgcgcgtacagcgcctcgaggtcgtcgctgcagctctcgcggcggtccacgggcagcatgcggtgcgccgtgcggttctcgcccgacatgcgcgagtgctcgtagatggtgtggcggctgtgcgccagctccagcagcgcgacgtcgaagcccgagtcgtggcggacgagcgcgggggtgacggacatgatgggaaggtggtgatggggtggtgctgcttgtctgcttgaaggcaaaatgcggaatgatcttggcggcgaccgttggcgggttactatgcaacatcgacaagttgaagtctggtcaaacagcatgcgcatgacacaagacggtattgcgaacctcggcagcaatgatgcgcgcgtcaccagtccgtttttatcgccaccggagagaaacgcggcgcgcggtgtcggcggtttaactttagtcaaattgctcctgttaattgctcgtagcatgcaaagcagtctatgcatgcccgcggactcgagcaagccggcaggtggctggctacggcgagttctcgtggtgcatgcctcgcgcgcgcgagaaaaatggagaccgtgcaatcgatggcgtgcacgcagcagcatgcagtgcgaagctggcatgctagtaagtcgtagtcgtcactttgctcgttatttttgcaggcgagcgtcaccattgacgatcgcccagtgaatctaaaggagccgtcgggttcagttgattagaaggttgtaaagagcggtagctgttggcgacagggaaactttgctcgagagttgtctgccatttgctctcagaataaaattctagaatagtattctgagaatatatagcctagccgcttgtgtggctacgctacacgttcttcttggcatgaagcggctgcgaccaagtatcggtgcctgttagccagctcagtgaggagcccagcgcgccagaacaccactgcagcaggcttgatggtgatttgtacgcgtccacgggttcaatcgctgctaagacaatgcattagaaactcgcaccaaccagcagaaagctgttagaccttgtacctcccatcggatatccctggacggggcctgctctttcatctggtgcagtcacttcaactccaagttagatccatccgaggtcacctcaggagagaagcgcgtcgtagcttacctgagtaatgttgttgcgatgtcggtctaggacctgccgatccggcacctgaaatgtctgcacatgttagcaatttcacttccgcgtgacgaacccgcaaacgcaaaaatattttacctcctggacagttgggaagctgcacgagaactggacgtcgccaaggttgggaaacgcgtcatttcccacccggtcgtccgaatccatcacatcgcgttgacccataatttcctgcacttgctcctggaaacgtctacgctactgctgccactctccgtcaatccgggccaggctgcgacctcgagctagtgctggttgcgaacaagttctgaacgataccaacatttggaacttgttcgtaacctttccgaaagtgttccatttacaagaggcaccaaagcgacactatagagaactagagagcttgtcaattccgcacttggcgggaagctgctatttcgtacttaatcgcgaatatgaaccacccggacaacaccgaacaattggatcaataggaacacgcctgttcgcaaccagcactacctcgagcttggcttcgttgacgatgtagcgtttcaggtgagcgattgtcaacacgtccttgatgtcgactacgatcatgcgaccatttccagatcgttctcttcatggcttctgcagcgagaaagttgcggagtgagctcgcgaaagttgcgccaaaagtcggagtgatggtcacttcaacttccaaaacaaggtggaatccagttccaaaacaagattgatgacaaatcgctttacaatcgaccaccatggcgtccggcgaggcgctgctcgcgcggctctcgagcctcttccagcaagaccctctcatgtacgtcgcgccaagacgttcctctcgtgcacggttacctccaagcagcgcagagcgctcactaacatgctgtccttaactcccgtcagcgacgaggtcggcctgctcttcggcgtcgagcagagcgacctgacgcccgagaccgccttcttcctggaggaacataagctcggcgtggcttttgccgctgggatcccgctgttccaggctgctcgcacgcagttccacccgttgaacgcgctcctgcagcagggagcagatgaaatcatcgagtcggaggacaacggacgtcgtgctcagctgctgcactgcacacgcgccattctcctcatcagcgccgacttttacacggcctggaacacccggtagatcaactgatattgctgctttggaggcaagcaccggtctctttactcatgctgtggttgttgatgttgctgctgctggggagcaggaaatcgttcgtgacgcgcgggtggctgtatgcacaggaggaggtgaagttcaccaatttggtcttcacgctgcatcccaagagtattgatacgtgggcttatcggtaagattctgcagtaatgaagaggtggtttacttggatcggccactgacgacgacggcgacgagttgctgctacagacgctggctggccattcgactctgcgagtcgctctccggggatgaccttcgggtatttttcgaccagcagatggaagtttgcagtcggctggcagagcaaaagccacgaaattatcacgcgtggagctttcggcactggatcgtgtctcgacttccgcttgacttgacgcttaaggaactggacaacatggagacgtggtgcagaacacatgtcaccgatcactcgggttggaaccaccggcagcacactttgaacgagctgttgaagaggtaccaaaacgacggagatgcgggtgatgccgcgaagaacctggttctcacggagtacaagtttgtttcaactatcatggcgtcgtacccgagtcacgaagcgctttggtgccatcggcggtatgtggtgcagcgtttgattcagcaggcactaagcaactcggccagcagtgaccaagtcccagtggatgatgcactggtctcgcgaatgcgcaatgtcatctctgatacaaaaccagagactatcgatactgcagcgcttgctgagtcatggggagagtcgctcaagcaactagggagtggcgtgatagattggccttccgttctcagcgtggttttgcatgagatcaagaatgcgtggagttgtgggaacaagttttctcggcgatatgccgcttggtgcctggctcggctgcgtgtgtccttgcgtggaaggcagcctcatgacgaagctatagagcgtgagctgagttcgttggcgaccacctcacagaagcatttggttcaggaagacagtgtgctagaagatctttggcttcgcatgtgatgatagccgacaggtcgttgagaaatacatgtacagtcttcctgtgctacctgtattgcttccactgttatcgaacttcgctaaggcttttcggccaacgcacctcacttcctcgcagcaaactaaccaaatccaaccgcgctaacgctttcaaaactgacacgcattcgttgcggttaacgtgaacgccatgcttcacttatgcgaccacggacgccttcttcgagacgaactgcgctataccattgacaatcgtgccagcagagaagtggtacagcaggcgcagctcccaatccgtgcccatgccgtactgctgataaatatcctttaatgtcacaaagtcgtccagctcctggtcgcactgcaggtcctgtcggatagcgatctcaccgctctttcgcgccttggcctcgtcagacagcccgctcagcgtgcaattcacggcgggcagcacgatgcacatgttgtcgtacttgtccagcttgaggagagcggcgaggtgcttcttcaagtgacggattttgagcttggcgaacgtcgtgaacagcgtgcgctccagcttgggggcgtcggactgttcgtcttcgtgcaggagcacgcgcagagtcactcggtcactctccttcggctttgacgcaatggcactcgctgctgcactatccactcgctgtttcttgcgggcgctctcgtcctcggacgccgcagccgacgacggagcagtctcactaggagagccacctccaggcgagctgcgcttctctccggtaggcggcgaggccccagtcgatccgttcgatggtgaggacggacgtgacgacgaagctgaagcggttccctccgctttccttctccctccctgctcacctcaacaacatagcaactcaatcagtatcccaccagtctaaaatcccccgtctcattgcgtcaacgtacatgacgacgcgaggcggcttggctgagcacacccatgcgggtgctctctgtgtatgcattgttgaagtgccgcgtgcggttttgctgctgaataatcagatcctcgttgcgctcgaactcggccagattcgggtggatcttgctaatgagcgcgtcgaaattgggatcagggcgcagcgagcgcttggacgggatgtggatgcggcacgacgggcactcgcgcttgctctggcggatggcggtggagatgcagtcgccgcagaagcggtgcaggcactccatgaccaccatcgtctccttgatgatgcccaggcagatggggcacgtcaggtcggcgttgagctggcgcacggacagcgtcttggtggccgccgggtccgtcacgggcgcgcgcggctggcggtagatgtcgaagagggtgcagtcgtccaccagctccacctcctcgtacttggagcgcctgctgaggtggcagttgggcgtctgcttcaccaggttgtcgtactcctcgcgcgtgaaggtgtacgggttgcgcggcgggctctgctgctgctgctgcttggccatggctccgatggcatacacgccgctataagccccaaccgttagcctttgccgcctttattttgtgtgagctcttcgcgcgaaaaagtgtaaagatggtgtggcgctggtgtacgcatcaggtgggtgccacaccatttttacacttgcgcgttgtatgcggcggctgacgtggccccacttcgcctttgccgaggagctcagctaacggacctcccccctccgcgcgcaccatggcgccgaacctcaggatgatgggcctgacgctgtcgctggcgatcgccacgcgctccgtgctggacgcggacaactcccgtacgtcgcagctgttcgtgggggaggcatctccgtgctctacctgaactgctcgctaattgtccctcttgtatcgtttgacgcagtgcacacgggcatcgtgcgcgggctctacggcctctcacagctcttctgctacgccgtcatgctgtacctgtacatcaaggcgaaggtgcgcgtgactagcgaagaagatacctcgtgcaacagctgctaacgatgtggaatgctgtcaccacagaacaacacggagcctggtgtcgtgacggtgaaggaggacctgggcttcggccagacgggcgagcgtgacgagaagatcacggtggcggagcacgaccagcgcatggtctggaaggagctgcagcgcgtacgttaccgaagagctgcagagatttttattcagtgctggaggctgatgatatggtgctgttattgcttttatatctggtgctgcagtacgctctgggcacggtggtaacggtgttgatccactggaagtggggcttcttcccgccgctcgtgatccagaccatcacgcagccgttcaacctgttccaggcgccgatcgtcaaggtgacgctgctcggtgagaaggcgtggggcgagctgcgccgcccgtgggtggaccgcaacgatatgagcaagtccatcaactcgtggaacgacaccatcatgtcggcgctgggtgagccccccgtcaaggtcaacaagaaggccagcaagaaggccgccaagcgcaaaaacaagtagagcgagcgggacgaggtaaattgaggcgctgcttctggtgtttgttaccggcgccgtgacgcggttgtagatacgaactcggaggcgtcctgtggccggagctgctcgtacggcaccttcttgacgacgcggccagtgcgcagcagcacatcgaactggtccaatgaacgcacctgcacgatcttcgccttgtacgtgagctcttcgtcggaattgttgctccgttgtcgccccctcctgttgtgtcttgctgtggtagttgtgctgttgagtgcgaatggctcttcgttgctggcaggtatccagagaaccttgtcgcctcgggtgtagtggtagtaaggcacttcctccggttcatcgagcagctccatcttggatgccaggacagcttcaaacaacgtgccgttatcagctcgaacgttgtagaagtccgacctcgggatgcggcgacgaatggtgcctttgaaccaacggcgcttggcgtggaagagcacgcggtcgtctcgaaagaatacgggcatcagctcggactcctcttcggacacctgctgtggtggcgcttcctgctcctcctcggagtcggaggactctgacgaggacacggctacgaagcggttagctgcgttgactctgcgcaacccgtcggcatgggctcggatgcgcattagatccttcaattcgtaggtcgaccctggccattgctcctccgcggacccatgcagcagctctggttccaacgcatcgctcttagcggaatcgttagtcgcactcctcttggtggcaggttgcaaccctggtacttgcacgcgaatcacttctccgttccacttgacctcgtgctcgtcgctttgttccgcgttatcagcggccgcgaccatgaatttcgccacatcttggttagttcgctggaaatgggcgttgtagtcctgtatgcgagtcttctttgatttattggcggcagcaggctctaaacgagtccctgtggggctgtcgacggaagtctcggccaacggctgctggaaactcgtgaagtctagcgctggaacttgtgctttgtcgttgttatccaggtcgccaccacttggttctgctcttgttggtggtggtgacttgtttccgatggtttggggagcaaccgggtcgatcacaggcgggtcgtcaacttgctgcaacacagtggattcgtttggctgctcactcttgggcggggaatttggtggagacttcggaggcagaatccacttatcccacggaatggagatatctttgcggtcgagcgtgcggttcctgtcacggtgcagagcttcatcttccagaaagaacctgtcgaagcgcgggtcgtacaccacgtggaagcgttgatcactacgtggggtagcttgttctcctctgttacccgtggcagcttcaaagctttccattcctaagcacaaccaccaagacgaacaacactacgtgaagggtcacgatattagctctaatccagacgctgcctggggatcagagtgctctatgagcctacagctaccaactgtgcatcttgcagtctgtgcaatacctctaaaccagcagcgggctgctcacaacagagaaacccgtggcgacaccaccctcatcagttcccgacagcttcgtgcgcagcaggtggcccgcgtgcttgttaacgatctccttgccttcggcgtcgaacaagctcgtgatgaacatgccgagctcgctgatcgtggagccactggacgtgaggctgttgcgcaccaggacagcagggttctccttggggaagatccgctccatcaagatgtacgactccagctcagccggactcatcttctggatagcggaggccacctcgtcgccgtacaggttgttgcctccaccctcgcgctgaggcttgagcacgtaggagcgcgggttggcggtcgccatcttcttcacatcctcgatggtcgcggagtccttctcaaggccgtagagacccgcaaacgacgtctccagcagcttggcctcgtcttccgacatgaagcgccgaaggacgtcgggctgagcaagcacctgctgcaccttcttggtgccagccaagtggtaggcgatcgacggacacttgatcgcgtatgaccgctcaatcagcgtgcggccagcccactcgtgctcagtagggtagtcgttgggcgtgtaggccgagcggaagtaggcgacggagacctcgtgtccgtcgatgacgagcgtgcgcttgccatcacgctcaacgagcttgccgcgggcgtccacgtccgccatcgtacggcgcagcacgcggacgccgtggtcctcccacaagttgtactcgagccagcgctggtcgatagcgttggcttcattgggctgcaccacaaacatcacgacagcgctgcagatagggggcaaaacgataccgtcaactgccagtccgcagagattgcacactaaatggcaagttttcaacgtactccttgacgccgtagtgcttgtgcgcagctgcgagcgcgttgggcagctccttgatggcgtcgttccgcggcaatccgcccttaaactccgacgccgcaatgccgtagttcttctccagcgccgggatgtccacaccgtggcggccgacaaggtagctgcacgcaaacccattcatcacacacaaaggttagcaataggcaacacaagcaacagtctagctgatcgctaagacggacctgtgcatgcccgagacgagcgagctaatgcaggcgaaggaggacgagatggtgttgagctcgacctgcagcaggcgctgcgagtctccttccacgcccgcctgcggctcgtgcagcatgtagtcggagcggtggaggcccaggtacgccttctgctgcacgccctcgtcgtgcacgagccgcgagagctgcagcagccgcgccgtgaaggcgtcctcggccacgacgctctgcacgcagctgtgcagccactcgacgtcgcggctcacgcggtccacgagccgcccgtagaccggcgacagctgcgcgccgtgctggaactgcgcgcgcgggaactgcacgggcagcaggcagaaggggatgtgcgtgaaggccggcgtcggctccttgggcttgctcgggtcgcgccagcccaccagcagcccgtgggccgccgcgtacgcgatggcctgctctttcaggtccgccagctgctgcggcgcgaggccgatgacgtcgccgctctccacggcgtccgccgtgtgcgcagaggccactgcagccaggagatccgccatgtcgctgctcttcgacacgatgcaaatccgatagtgacggcggcggttacggaatcgatgatggattgcgtatctcgcctgtgattggtcagcgttgtttacgtggctcggattggtcgaaatgattcaaccgttacccgtgttttagtgagccatttgcggactaagagaccgaaaatggcggagacttcggcggcgctgagcccccgtgccgtgcgcgaggaccccacggcggataatgcgagcttgcctgaatgtacgtcgtcttgtggtcttggacacgttggatatgtggccggaacgattgcggttcgaccgcaatttcgtgcttctgatgaagtgcatcgaggcggattgtggggcggaggcgtcttcaacagtataagtggcgccgactaatcatccgctcttgcacattctttttggtggcatgcagatgaggaggaggacagactcgagagcttgcaatctcgactgcgcgcgttctactgggcgcacgatccccgcaaagtcgatcgcgtcgaggagatcctcgccaagcaccaggtgcgtacctgctgatcctgacggttgttcatagagcaaagtggctgaagcttatgaaatactgtgcaatcgatgacagggcaaggaggagcagttcctgcagcaggttcatcgtgagttcggcgtccgcgacttcagcggagaagaagcgatcgacgatatctacgagcaccaacgatactcgtacctgagcttctcatggggctcgtcctacccaggttggtgatcaaagtatggttttaaaagtgtcaagcgctgttggtttcgacgaactagttgtgttgtggggatcaggtcaccttcttccgacggatcgccatcaatggagcgggctgcacggctcgccgtccagccaaacgcgctcgaaagtggagcctcagctacctgttaactgggaatggacgagcgactgggttgtcgacaaaacgtcatgcaagtgtgacgcggacggatgggtctacgctttggacttcaccatgatcaactatttgatcaagaaaggtgaagagcgcagtgaaccgaacgccacggactatgtgcgtcgaagacgctgggtgcggactcgtcgccgtgtccacagtgctattccgcccattgaactggggagtggagggagcgacaagagcgacgctgacgtgaatagcgacaatggagggaataacgcagtggactgggttctggagggctaccaagagctgacgtctccagagaaaaaaagcgtgacggtcgaagcacaggaaaatgccgacccagaagaatcgagtcagccgacggagactctacaaccagcgtcgcctacatcgccgaaaagacctccaacacctccattacgtactgagctagcgcactactcgatcagcatggacaagtctgagtttgacgctgcgtggaagtcaaccgtcaaagatctggagcaagtgtacgcacgagcaaaagagcagcgagcgaaaatgaaacagaagtggggcgtgaagaaggagaagttgaagcgacagattcatttgttagagaagacgatcatctcgatgcaagcagttgctgttgaggaagaaaagaagcgacagaatgagcgactaaagttccccgggagcccgcgctattcaaagcgagcgtcgatgccttttccgacaagcaggtcaacgccgactgctgcctcgatggacagtccgacaaacgcgatcaatctcgcctcaagaatgcactgcgcccagtccaaactcgacgcgctacgacggtactattggcacccgcgcgagaatggctactcgctgcgcttcagcattgacggtattttctacgggcttcgggatttctttgtcgaaagcttcgacagctcgttctcgatccagatcagccaccagactaacggcgctcagggaatcactcccacgtgcaaagttacgatgaaaggccacacggtttgttgcggtaagcacgtaaaggttgtaggcgagaaggggacgcggataccgaagtcgatctgggacagcatgtacatggactccgactttgaggcctccattaacctcatttacgtcgaggatattgacgacccaagctccgtgagtcaaggccgatgggagttcctcttttcgcccgaggccacgtacgtcgagctgatcaacttcacgagacgcgtaaaaggaggaatggatctacccgagccgatggtccgaaagctttgctccgacgtgttgacctcccttatccgcgacctgacgctattgtacttcccgtatgagttggcactagctttcaacttgccacctgccaagcttgacattaagggcgagatcaagatagcaggccagcccatcgatgccgtcatggagaaagagctggaggagctcgacttggacgcagttcgagaagagcaggcaaaacagaaattacgccgacaaactgctgaggctgccgacgaagaatcgttactcccgttgacccccattctggacgctgcagctgctgctgcgcaaatgttttcctcactgttgaccggttcgagcaaggaaatgctagcgattgcagagctcttggaactctcaccgccgcagttcaatctgctggtcgctctcaaaacgagtgggctgtttccatctacgcacaatttccactctctcgcttcgatctgtgcgtactacaacgcattttcacttgatgaagaaacgatcgagaccaaagatgggcatggcgaaaaatctcacgatgaacggctacgctcagtgtggaagcgcgtccttgagctggtgtatattaagaagatgcacgctgcgcgagtttcgcccaaggcccggtcccgccagaagttgccatcggtagagatcagctcaaccgaggcccaaagtgccttcgagctgttcgacatcgataagtttttcgatgctataaagcgcttgtcaaagaagccggcctcagtggaagtggccgtacatcacttctactcgacattgaatgcgatgaatgtcgtcgaagccctttccaagctgtacgagcgtatcgtgctgggcattgactacagcaagccacggactggggcggatggattcatctacggcatccgccttggccgaaaagcaaccgtacaccccgcgatggcagtggcagcagcgtctgccgctgcggctgctgccgccaactctgacggtgaaatccaccctgtaggcacacccccagtcctcgatttacgacgataccgtccgacagaagtctcgtttcgaactcgcgtccaaacattcagcaagttttggcaaactttgaaaaatgtgatcgagtttgttcgggaaaatgtggatgatgtgagtgccgagcttgccggcaacgtgaaggggaccggaaatgactgcgtgctcaacggttcgttcaaggatgccgactaccgcggtccactgagcattgggcttcgagtgcctccgtgtttcctcggcttttatcgggctgagatgatcccgctgggaaatgatcgcgttgggatgcagctggacgccatgcttccgtcggtatctgccaagaccacaactggtgatgcgaagccacaaaccatcaagccactggaacctgtcggccgcgtcatgttggcagatttgtcctccgaggtactgctggatctcgatgctctagtggcacgggaggaagagcgccgagaacaagccttactggcagccaaaaagaagtcgcaggccagtcctggatccccgaagcaaccgggagccacagttcctaagaagtcaaaccagcactgcgcgctctcgttttctttcggtccaacctccagaaacgaagaaagcgatgacgataccatggggaacgacaagacatcgagagcgctcggacagcttaacgtgagcaccagtgagttcacgaagctgcacaccacggccaaagcaggttccttcatgctgcgcgtgctgtcgatcatcgattatctgctgacgcagtacgtgcgaccacaacttctcaaggcgtttccgcagcatcaggtgctgtttgatactgccaaagcggccatgatggagttgctacagtcacccaagcttgaggtggactttgacattatggcaagagcgtttatccatgaggacgagagcttgatggtcaccttatgtgggtcaccactgcatccaagtccgatgacgttcaaggacgaggtgaacttgctcgacatcatcctgcaagtggatgacctggttaacatttggatcgacgatcggtatccaccttattcgaaccccttgtacttctgagcaagaccgacaaaaattacttaacaatgaaatggagcattgattccgataaatacacagtgcctagaaccccagctacatgtaagcttaccccaacctgcttcactaacagcgtacaagcttatcagcgagtagtgcttctgcaacgccaaatgacgtgttcagcccttcaggcgaaccccactccgcactagtctacagcccctgctattcggcatgcataataaattttagggcatcttcctcacagtcgcgtccgcctacacctttttctccacaaaacacgcacgcacagcaaaatctcgagcccctggcatgaacattaccacgtcagtcgccgccaatacaggggggaagcatgcaggacttacacaatactggcacacctccggtgtcgcctttaggacccttcaacactcgatccaactgggagtaattgcttctccagccgagacatttcatctgacaaccgagcgatatgcgcctctgcttcctcacactcgttcacgcattgctcatattctgcccgtattgccctaacatcaagttcatcatttctcccaggagttgatggacttgcgcacgctggtttcctggttgttgtgttttcgcacaaagtcgttcctctctcagtgtcggcaactgccaacgcggaaatgccctgtaaccgtggcaacacaaaagcaaataaaccatacacaacaagcgattagtttggtgcccagaagctcggactcacccgcacttggcgctatgccgacgcgacaggctctatagatttctttacgcaagggttgctcgccggatttccattttgcccatcactgctcgcttgcacctggtgctgcaatacaggaggcaaaacgtgtgcactcacgaatgtactgacccctgatatgtcgttccgctttggcgactccagcaccggttcatgagcttcttcagatactgtcgacggttcttgttctggtgctgtttccgctagttgctgttcgtctggtagcagcaagtcctgcttgttcatattctccttcgtctcgcaatctctcgcttgtttgacatcagaaccggattcttcagtctccggtctcttggtagctacagccgcctgcgtttccttcaacgatttaatagcagacgaaatcacctcaggtgacgccgccgtggaatctaattgctgagaaactgcaacgctagtcttggtttctggaggcggcagatctagaggagatggtgacgacgaagctgggcttgacgaagaaccttgatcagaagacgttttcgacaatttagctgcagcgctttccaataagcgattcgtctgcgccttttcacgttcagcaatttgtcgccgcatctctttaattgcatcctgcaagctgcttgaagttgtcgtcttagcttgtgcgtcgttcccacctatcctcggcgaaaagtcttccgggttgagacggatcaccaatgattgcgagcacgccgtcaacggacgaaattctggagttgccacttgggtgtctgttggagccttcgcacactcggccgaagaaggttctcccttgtcgctcgattcgttcacttcagatgtagttgtagatttgtcggtctcacaggtagatccatcagttgtcgcacactcaggttgagcaatacctgcggccttctccgacgtgggctgtgccaacttgttcgctggatttacatctgcatttgcagctgaagctttaccaacaccgacactccctgcctccttcccatccatggctgtttcagaagaactctgttcgggctgtccggtcgccgtcgtcggagctggtgacggtgtcgaaggcacagccttgtcttctaccttgttggtagatcgcttacgatttcgctgcatggatcgtaagatttcaaggcgcaacttgtcaatttcaggacttgcaggctctaatttcttttgctctggaagtggagaaggtgtcggcgacgacgacgtcgactgcagctcgatcgttttctcgcttgttgacgtcggggttttcgcggggcgctttgtcttacttcggagcgcagctgcccgaaggctgtcaaggtcgaaatcatctggatcatctcgctctccgctggcagcagggttggcaaggccaccatgtcctggggtgggacgcggaggaagacgagacgtatcactcattgagcgctgcaataaatgaatcggttcacttggtgtgggttgaggtggagacatcgacaccgaacggtatttgaatccagcatgccttgggggttccgagaacatcggatgaattagcacttgaccctcgttatcgagcatttccatactgccctgacggttcacgcggagaattcggctgtcttcatacggtggtggcggtggcatgggagctgacatttgtggcatcggcggtctcatcggtgggtgaggggcaccagcgaacattcctccagggtgaaatgaagctggaggtggatcttgaaacacgggtcgcacattcactggctcacctcttggaccgtttctcatcattgcatatgtaaatgggcctggtggtggtgcgtctccaaaggggcgttggcgcgtcacccgttcgaattcaacctccatttcacctggcggcgtatccatcatctgcattgcctccagcttccgcttcgtcttcttcttgccgcgcttcttttgcttcttatttcggagatgaagacgaatctccatcggatctaccgggtgcgcatcaccctgttgctcaagcataatcgctcgttggacctcaattgctggcttcggagcagctccttcttcaaaaatctctccatcctccaaattctcgacgcgtacaacccgatccgccgtagtagacgaacccgaagagccctgtccatcttttggcgcttgactcggaagttcttcgtccacatctgcctccatttcgtcgtcctcctgctcctgatctccctgtgcaaacggtatcgtctttcgaatcgcatccagcgccgctgtcacgttctcctccgtctggccagctgaaggctgttcgctcacggacggcggcaccgacggccactcctcgtccacatctgactcgacatcctccaccataggagccatcatctccgacgccgactcaatttgcggcaaagacgcagccaccggtgtaggaccattcccggtgccgtccaacatactcaacttgacagcatccgacgctggagagctcggagctgcagcgggagaagcagtaactgtggtagctgtagcacggggaacagtaactgcaatagcagatggaggcgaagtagccactgtactaccagcagccacgtcggagatcggagctgttggctgccgctggctgtggccgtgtgtccccatgggttcgtcctcttcttcgtcgtcttcttcgtcgtcgtcgtcatccagcgtcaagtcgatgcaagcagcttgattccacccacttgtactaacacttggcattcgtacgggatcgggcttcaacgccaccggtcggaccgcagtaggaactgcagccgacgtgggtcttcccaactggtagacggccgaagtagtaggcggcagctggggcctcccgccagacgcaagagagacgccaggcctcttcatttggacgaacgagtttgtcttggcttgagtttgggtatgctgcgctctctgctgcgccttccactgctccttgctgcgagccattctccgggccaacggactctatccaatcgcgtttacgcccgatacagcgagtatctacagataaatagggtatctacgcgtagccgagacgcagacgcttcgattggccttggattcacggcgatagctgccgtgtgggcgtcgtggcgagctcctccggcacgcgcggtggttgcaggtccgtctccttcggttttcgcttttgagcggcgtccaagggcatccgtttcgcactaagtacggttcaagagtgttggtcaaacagtttggtgtgcgatacaccatccgcatccacttaaccttctctctgtcagtcctgaaaaatcacctccaggcgcaagttgaagcagcagacgaagacaacagcaagatggcgccccctccgcagtacgtcaaggccgtggcgctcaaaaactcgacgtcgcaccccgttaaagtgacggcgaccttcggctcggacgagttcgaggccgagggcaaggccaagatccacgagacgcgcgagctcgcgcccggcgccgaggcgagcatcaaggagcacgagtacgacatgggcggctggacggccgtggccgcgctctactcgctggaggtggagcactcgacggacagcggcctgctgggcaagacgctgtacacgcccagcgtcagcggcatcgtcgacgtgctgcacgtggacatcggagccgacgacagcgccaaaagcttcaaggtcgcggctgtgcgcgaggcctgagctggctgcagtgctgcagacgcctctaacttcctctcgactgcggctgaagcgcgcgtcgtttccttttcgttctcaaacaaaaatctgttttctttttcttttgtttacgaagagttttagcaattggtgtcgcctggtctggtcgtgtattgtgtgagtggtgagctcgccctgcgtgtgcgccattaaatacttgtggtctttgtccaagctgctgtccgccagcgagctgctggggttgttggtgcctccatgcccccttgcctcctacagggcccccgttttgctgttaatgtctctgcacaagccgagaagtcagcgaggtggagtcgtcgaggaggaggacacttacacaatgtggctcgacgcaggcagatcgtcgatgggtggccggccgtacatgaccatggaggagttgctagacaccttgtatgctggaaggggctggttggtggcttcgccagcgtcccttgtgtcgatctcatcaacctgtgagctggaaaagtatgcgctgcccgcatcagagcgtggagaagcgggggttcctggagagtagggcgccgccaagtaactcgtgtcgccgctttctgaccttggcgtgtacacgtcggcattggagctggcgttggtctgcacggatcgctgcttcgccaggtcaacgtggagaccaaatccccgcttcggcccgctgtcgctcctccgtttgcggtacgagctgctgccacgcctgctgctgtcgcgctggcggatctcgccgctctggttgctgagcacctccaggctctcgtccacctctgcttcgatctctgcgagttcctcctcttcgctgcgaatactctcgcccgaaagacgcgagtcgcttgtctggttgacgctgggtttggagttgtccggggcgccgctgggactcggctgtttcccacaaagcttcttccaccacggcacacgcacctgagaaccatgacatcgcaaaaaatacacgaacacaacaaaggttaacgtctataaataaggaaaaatagttctggtcctgctagctgctggtcactgccaggcctttggtgctcgagtcacagctctccgtcaccgagacttcatcatagctgactggataaatacgtacggtgttttgtcggtcctgggcgttcttccgcttgcgctggcggacaatgtagtcatacgtggtgatgttctccatgcctgcaagaacacaaacaacgaaaagcggttagttcgcttaccaaaaccagacgataggtaccgcagcacgtacacaagtggaagtggaagagcgcgagctgtccgatcatgaatagccacgggctcaggaaggacagcagcacgatgtggatgatccgcagcgcctgcagcgagacgcggtactgtccgtccacgcagagccctgtaacatcgtccttctccttcgagcagccgtagctcgtggccgagttgctcttgatgccatcctcgttcgtgtagagctccactacgagatagatgcccacggcgatctgcacggccaggaacaccgaggcgcccacgacggagcccaggaagaacgtgtagttcttcttgcccacgcagttgttgagccacttgcagtggtggtcgaagacgtccacgcacttgtcacagaggcggcagtgtcgactctggttgttcctgcatgggtagccagccagtcaatcatcactaattaattagaactgcggacgtcccattaaaagccactaatgcccggcacgtacacgtatttcatgcagacgttgcagtagacttggttgtccgggcgtgagtccctggcgtcggccatcgtctgcaacgtcacaatagataaagacaccaccgaattagccgcagtctccgactcgaattgtcctccgttttagacgcaccgatggtctcatgatgcagtcgtccgacgggtctgtgcccgtgcagacggccacggacacgacggtgacgaggcaggcggccgcgtacgcgacgctgagcacgatggccggcgtcttgtccaggacgggcgtgtagaaggcgaagaagagcgccatgacggccgggaagaccacccacgtggcgagctgcagcacgtggaacggcgtctcccacccgttcttgcgcatggcggacgctttagcgggcgacggggagtgtgtcggtgggcggcggggcgtctggggcggcggggcgtctggggcgccgcggttcgcgcgcaggaggcggcccaaagctgtcgccgagttgcccgcggtgtcgtcgggcgctgctgccgtgctgtctatcaaggagctccaaaacgagaactgcggtataaggtttgacaggtcgaaaccagggtaaaaaacggcggtgcttccaagcagcgagccagcagctgctggctgctggctgcgagtgatagcagggagagctgtaataacggcgtcacgccacgccgcaccaccagcgcgacctggtggactagttactcacgggtgctccgtggtcgctggcagcggagcgtggcgacctctttcactgccataacctgcggccttctatcggcgaggttgtctcagatatggattctgcgaggcgccagtctgacttcaaaaaggcaactaggcgaccgtcactccgagccgctgagctaacagctagctgcgacgacttgctgcagcccgtttgcaagcatctctagcgattggacccaaggtcgttggtttcacgccggccgttgcggtgaagctgcactgcacctggaaaaagccggagcgtttcagtgcattgtgccagcgccccttcaagatccatcgatccaggggtcgacgacagcaagccaagcaacgagaagccagccatgccgagcgagggtgcgtgttgtcctcgctgcatcttcctgtggaacgatatgctcgatggctaacgcttgatcgttgtattggttgccgtcgtcaatagaggagaccatgaaccagcccgagctagcggaggtcgggaggtttgacggagaggaggaggaggaagaagtattcgacaacgatgtcggcgaagagaacacggaggtatgttgcgagtgtattgcagtgcccggaggacgtctggcatctcttgtcgtcggtaccagtatcctgctaacatttgccggggtgcaggaggccaagttcgacgagatgatcggggtgctgcaggacatcctgatcgacccggagttcgtggacatgcagagcgacttttgtcgccacaattgtggtaagacgagatgccggagcggtgattgttgccgctacctggttcggttcggattcaacggggtgcacttactaagccgggcctctggtcgcaaccacacagagatcttcgacaacgtgtccgagaacaagctaatctacatggacatcttccagcagtacacggaccttatcggtgcgtcatcggtgcggtagccttcgtgcttttttacttgtctatctgacgttgcctatctgtatgactcgacgctctcagagacgttcattgagcggcgcctgcacgaaaagctcgaggtagcaatcgccacaaaggaaagacgaatgcgtatgtgttaacttaccaatgcttttacgcttccagtatttttcgatggacgagctgtgcaaccagattcaagagcacgaaggtaggtcttgttttttttttctcgtcagctttgtcttgggtcctagcaagctcatacttagtctggtttgctgttcgcacgtaaattttgtgcagacgagatcccgttggatgtgatcgacgtactgctgagcagctcggactttgaagagttcaagagcctcatgctgtcgttcaagcagaacgagactccgtgtatcgagatcactggcgatgccctcatctgttgcggcgagtaacttagttcagccaccaagagggtttcgtacaccatcactaaaattgacagcttcgtcatttcaaaagagagaaaatatggctcgggaggttcttaccttgaaatctggggttgtgtctacattatgatgcagcatcctcccttcaacatatacggtagttagaagatattctgctacccaagcaaaaaatatcggggcttgcctacctggtccttgctgcgctttgtcgccttccggtgggaagttatcgagcttggaattgcgtgttctttcttctcgggtgctggtgcagcttcgtcggccatgttaactgctgcggttctgtctgagtggggcgggttgagttgcgaccgacttgatcaattggtggaggaatgataagtgaaagcaaaaggctacgaccacccgcttgaaaacagaagagcactgacgtatagttagctcggtcggaccattgcaacttctgtcccatgcctgacaaggtgcgatgatgcaggtgcgagaagtgctgctacctgggatgctcagaagtcagcatagactcgtcaccagcacagctacagcgaacgctgatgagaacgtggcggctggataacgatcagaacgctggtaccgtgcgatacctcgttctaatggcatgagacgaagttgaagataacgaaatgcataagacagcgatttcgtttttcttggtggcggagtagatgtgtaagaccagacgctgagcaaggtcaagatccgacactcgttgcccaaactaaacttggtagctcgcgcttgtggttgaacaggaacgaatgtactctttgatcgatacactaccctgtgtgcaagtggcaccgattgtattgttcgccatgtaaggaggggtactgtaagaacgagaggagaaagaagaaattatcttacgtgtagggactacatgtacggatctaccaaccaccagcctacatgatggtgcacctaccgcacgagcacttcgccatcgccttcgcttcgagctcttcatcttctatgcggttctccacctcctgtggtgttgcttggaccgaaggttcagcggttgcaacttcttgagcgggggtcgactcggcgggaatgttcgctacatccacagcctcggtcacttcgatgtcgacatccgtttgctcgacaggttcggtcttgacttcttccatcgccgggctctccaacggctcagtcgctacctcttccgcttcttcgggagtactgatgtcctccaccgccacattctcttcaggtgtagtgactacatcttccaccacgcctgggatgctgacgtcttcaacagtagaaacctcaggctcagctggaacaacgacaacttcttcttctgtcgctttcaactgtgcctcgatctcggctgcttcaattgctaccgtcagatctgacagcacttgctggatcactgtcgtcgtctcttcatcttctgctgatggtgagtcggacgccagttcctcgacagtggtggcgtcctgggcagggacggaaacgtcctcaagctcggtgacggcttcatcgtcgccagcgtcacttgcagactcctgttcggggtttaaatcgtcgtcgtcagcaggatcatcgacatcctgcttgtcttccgacgcctgattgcatacctcaatctccactttcactcgggggcactcttcgctctcagctggctcctcctcatgagcttcaagagttttctccatcgacgtcacgactgttggctcggaggcagttcgcacggtgctctctttttcggggattgcagccctctcaggcactgctgctgcaccgcccgagatcaagcctttcaatgcggtagcatccaccccggcctgctcgatcttcgccattgccatctcaagctgcaaaaccaaacgatggtggataagttagatccattggcgccgatcaagaaagactccaggacatgagtagtatcgcacctcttggttggagaactcggcgggttcgttcttagcgacaggctggaatagatgaccagcgtgttcttcagagaacatcatgaagtgctgcacgcagaacagcacctgcaccatgttcgtgccctcatacaggtcgtccgtgcaaaagagcgacaagtcgtacatcccgatcctgccaacacaatatcaatgaaaaccttagagtgtgttgcagcattaatgatagatatggtggtgtcacgtacgacttgcactgcttcaagaagacggaaatgttttcgcgttccttccacggagccatgcgcttcgtgtagttgcggctaatcggcgacttacagttggagacgtcggggaacagcgtttccatctgaaagcataataacaacattgcaatggttagaccatgtgacgcgctcaatcatagcacagagcatcacataccatttcgcgcagcaccacaccagacctgagcgcctcgaacagatccgtggtcggcagctcgcgcttcaacacactttcaatccacgtcatcacctcctgcaatcaagatacaagacctgttagctctcacacagctgtagaatcgtatagagctccttacgcgctgtcggcgaaggtactcgatggccatcgctttgtcgctggcccacttggccgacaacgagagattgcgctggagcttgccgcccatggccgactctcgaacgtcgctcttctcttcgtggttcgggacctccacgctcaagttcacgtccatggctgtcgatgggagttgtgagtcttcgttcgaagttggttggtagctctcggctgggctcttccgccgtcgcgtctggaaagaaagtgtgccccagccgctcttcagactcgtctctaggcagtacttagccagcgaaaccaacgcaggagtgcgctcatgttgaacagcaacagcgcccttgactatggcgccccgggtcgctgcatcccatcgctcgctccacaatcccagcgccgtgatggaaatacactttctcacacgtcacatgttgccgttagctgctgccaccgatcggtcaccagcggctactttagccacattttcgcccccgattcgtacctactcgagttgcctgtcctcggccaacagtatcgacctccagactggaaactcaaggcaccggcacgatgatccgcgtggtggctggaacgtatgagggcttgctgtacgggtgggagtgccccacggtggcctcgggcgagagcaccaagatgaagctgaccttcggctacgcggcgcactcggagtgcatcaagagcgtggcgctcatggccgccaagcagggcaagacgctgctgtcgggcggcagcgacgagatgatcaagtgcgtggccaatagccgctgtattgcaatggttttaatggtgtgtacctgtcagacagaaagctaatgtgttattttgtcataggatctacaacgtggacaagcgcgtggaggtcggcagcttgatggagcagcacggcgccatcacgagcctcgagttcttcggccagagccacgtgctcagcggcagcgccgacaactccatctgcatctggcgcacgtcggactggaactgcctgcacattctcggcggtcacaagtacgtggcacttggccccgtgtgatgtgacgctgtgacagaattctaaactcgttgctttgtggtggtgctgaacaggggcgaaatcaactcgatcgcggtgcatccgagtggaaagctgtgcttctccgtggcgcgcgaccgcacgctgcgtatgtggaacctcgtgaagggccgtatcgcgttcatccgtcggctggaaaaggaggcggagctcgtcatgatttcccagaagggcacgcactacgcgctcggattcggcaaggacctgtcggtgtttaacatgaacgcagaggtgggtgggcgagtaaaaactacgatggcatcttgtcggtggttaaaactgaccattgtgttttgttcctcaatagctggtgggcacgctggagcactccaagaagatccactgcgccgcgttcgcgacagacgaatacattgtgtgcggtggcgatgacaaaaatatttatatctggaagaccaacggaacgtacgtgttgcaacaactcagcaagttttggtgtccaccattgcgtggtttactaacattgatggtgtgtggtgtttgtacagtctggtcggtaaagtgacccacaaggacattgacgctcgcattcgatgcatccaggtggtgtatccgcatggcgaggacaagctgccgtggattgtgctcgctacgtctgacggcgcgttccagatctgggactttgcctcgttcacactggatgcttcgtcgccggaggaggcaaacaagtcggtgcagcccatggcctcgaccgttctgctcacgaagcctcgtgtgacctgcctgtccgtgtgcgtcgccagtgagacggttggcagctcgggtagcaagagcgagcctgctgcccggaagggcaagaagacgaagaaggcaaagcaggcggtggacaagaagcccgctgctcctgctgccggcgtcccgcacgtggttgtcgagctggatgacggcaagactgaaggcgaggacgaggcgtccaagaaacgcaaattgaccgacggtgcgcagcaaaagagcaagaacaagaagcggaagcagaagaagacgcagcagtagatcatcagatgggagacaggtaccatccaagtaatagactttattgctgtacatcaacgctgttgccggggtagttggagtgacttcgcagcacatggatacaggtcgtacgtgtaggttagagcgcgcgcctcgagctaagtcaatcaacagcacttattcatacaggtatgtcgatgtaaaatgtattcaaagcgatacgatgcaaaactttacgtatgtcgtcgctgcctaagtgttaattgcgcaacacggcattgaatgcgtgtttcttggtctcaagtggttgcgataagaatggcgacaagcatcgtagacgagcaccaatcgattaatcttgctactttcctgccccaatactgcatgtaataaataaccaatgtacaacatcaactaacgttagatcagataacataaccgcgcgagttaaaaaccaaatgtacacggcaaacctccgggagtctggggaaactcgacgatgatgtggatgtcgcctggcttgattgtactcgggcttgggaacgcgtatgcatcttcgtacaccagcgtcagcggctccacgacaattccgagctccttaatctcctccagccgctgtttgtagtcctcgtcctgaggattgagccccccggcgtccgtcttggctagacgaagcgtaagcgaacaggcatcgagcttggcaaagaggtcctcgcgaccggagtccatgactgcttgcttgacttcatccttgatgaaactgcagacttctatgtcgacaatgtccacgacaacgacgatctcgtgctctggtagcagacagcggatgcgcttcatctcggctgtagaatgggggcattgtttacattcttgcagttgactggaaatgaccaagctggagtgaaggagatggatacatttttcactcttgttgaagtggttgagtggatttcgcccaatgggcgcgcgcctccctttgactggccagcgttgcccgatccctcgaccgcgtttcattggtccgtctgatcccactttttgactgaaaccggttgtcaatcatgaaacgctccgagcccacttcaccttccgtccagcagcagcagtcgcccagtaagcagcagcgcaccccgttcagcaccatggcctccgagaacctgacgcacgccatcgtgggcctgggcaacccgctgctcgacatctcggccgacgtgacgcccgagttcctcaccaagtacggcctcaagctggacaacgccatcctggccgacgagagccacgcgcccatgttcgaggagctcgtcaagagcagccccgtgtacgtggccggcggcgccacgcagaacagcatccgcgtggcccagtggatgctcaacaagcacaacaagtcggccacgagcttcttcggctgcgtgggcaaggacgcgcacggcgccaagctcaaggagtgcgccgaggccgacggcgtcaacgtgtcgtacctcgagaacgccgacatcaagacgggcacgtgcgccgtgtgcgtcgtcgagtcggagcgctcgctggtcgccgacctgtcggccgccaaccacttccaccacgaccacctggccaagcccgagagccaggagatcatcaacaagggccagtactactactcggccggcttccacctcacggtctcccccacggccgtcatgacgctggccgagcacgtcaaggccaacaacaagaccttcctcatcaacctctcggcccccttcatcgtcgagttcttcaaggagcccctcatgaacgctatcaagtacgccgacttcgtcttcggcaacgagagcgaggccaagaccttcggcaaggtgcagggctggggcgaggacgtccaggagatcgccctcaagaccgcgcagcttgagaaggccagcggcgtgcgctgccgcaccgtcgtcttcacgcagggcgccgactccacggtcgtcgtgcaccagggcaaggtcaccacctacgccgtgcccaagatggaggcctcggccatcgtcgacaccaacggcgccggtgacgccttcgtgggcggcttcatctcccgccttgccctgggcctgcccctcgagcagtgcgtgaacgccggccactgggccgcgcaggtcatcctggcccgctcgggctgcaccttcccggagaactgcgagttccaggactaaactacctaccctcttccgtatcagcgcgtcttccgtccgggtcatcaatgcctgactaggagtgacgcagctagaagcgacactatgtagaccaagagccccgttgccagccgcctattcgtggcggtgcgtgtgcctccaccagcaactttcgtaggcgaagtgccgctcaatggcaccgactgcagccatcctatctgcagcgttgagttgagctcggcactttccctcgaaggaagaacctcctccacaaatagacgattgcctcggcgctgttgcttgcttctccatctctctcaagaacttcttctccatttacgttgatctgatcgtgtcagatgacctcaaaaataggcgtgctgctgtgaaaggtaggtgaggtcgagtggtgtctttccacttcgggagttgttggtcttgtccttcgttgtacagattgatcgctgctgcgtcatgtgtgcctccaagacgtacgggtatcaaggcttcaagtcgttcgcggtgcagcactgcgccacgctcaagccgggcgagacgtacgaacagcgcgccaccaagttttcgtccatgggctcgcgcatcatcgctccgccgacgatgaaccgcatgggcaagaacacgcacgagtccatgggcatgcagagtgggcagcacgtgcagccagaagactatcgcgtccctgatcgtcgcggcgtaagtgtgaaccagccgcgaccgagctcgaagccgttcatcgccaacagcacgtacctgcacgacttcccggcgttcgacgaagagcgcaggcgtgtgctgaccgtgccactcgaggaatacgagcgcgcgttcatggctgtagcgaagaggaacaaccagcagcaacagcaacaagttggaccgacgatccagttggcccaagtgcaggaggttcttcagctcgcgcttggtgacggcgcagttcctcgagtggttgaagtgttccacagcttcctcgatcgtcggggcagcgtccgtgacaagatctcgtggggcctcttccgacaggctgtcgaccacgtcgacgatctatttgaccgtgaactcaatcgcgccactactgcgagctccaccagcaagacatggggctctaccagcttcgccgacaagcagctcaacgagtatctggttcactcctcgacgccagcgagcagctaccaaatggacttcggtacctacggcgagaaccctcgggatcggccgtacatgcgaaagcgcggcatggcgtccaccacaatggacatgaaccctgggaccagccgcgtcacgaaccagattccaggctacgcaggcttcctgcccctcacgtcacacaacgcagaagctctagcacacgccaacggcccggaggatatcgactccctgcacccaacgccacgcgtagcacttcgactgttccacagcgacaacatcccgggttacacagggcacaaacccgtggactgcgtcaattaccgcggagaatgccgcgctggcagtgacccgggcaccaccacgggcgacagctacaaaccgcacaagtagaacagcattttgcctcagtgtttacagcttacctctgaatctataagttcaccataaccgcagcctcctccctcttcaatcttctgctttcgagtacagctaggctcctgtagtgggcggaacttgctccagcaactcggtaataaacgtcttgccgttgagaatactcgttgaggcgacgataagctcaatgggatctacacgcagaacagaagcagcatcggttagctagacattcgttggaacgcaatagacctcgacatttccctacaaaatgaagcgatccaccgcagcgctgcgacttcgaggaacgtgacgcctccgacaaacgccacgaccacgaccgtcttcttctttggcttgggtttcttggcttcatccgcattgctcgtcttgtccggtcggtcattctcagcgaggtggagttctgcgcgtggcccaggcaaatgattcataacgtggtcgatgcctctccagtggccgaatttcaggatctcctcaacgaggcgagcagagatcggctcgtagcctgacgtaacgaacgctgcgttctttggattcttaatgttgacatcgacatcaatgaccgacagattctgcgccgcgtactggaaggagcagacagagtcactggagtcgcccagtagaccagaaggttgacgttcgtagagcacgcccagacgctccaagttgcggaaggagaagaccaattcatggccgtaagctcgaaccaggtgcatcttcagtcgctccaagttacggcgctgcactccgtcgttcacgacgcaatacaaacacagcagacgcagcaccttgcgcagatcttcgtgtcggaagatgagctcctcgatcgtgcctagtacgccctctgcttggtccatgatcttcctctccaagtgccagagatcgcggaatgctttgccggcagtagtcgactcgaggtgttccagcaggttgatatgctgctcgatggactgctgggacgccttcatctggggcaccgtcttgacgaactcgttcacctctgcggcgctggccgagccgctcactcgctggaactcgttgaagcgcttcttgacagccaccgcctgcacgttcagcgcggctggaatggtgtggatgtgtttgtcccgaatctggcggtagatctcgtccgtcgagttcagagccaccgggacgggggcgtcgctcgcgctgtcatctgcgcgtaggatctgcggcgacgccgtgacgaatccgtcctggatctgcatgagctcatcgagtgccgcctcgtacgtcaacggcgtggagaagaccgaggcgaagtccacgctccggtccagcagaatcaacgtgtcgagtcgagatcgctgaggtcctgccagcgtccctccttgactcgctgccccgccgctcatgatgcccgagcctcccgcgttcatctccatcaggtggttcaacacaagcatcgacatctcgcccttgtacttgatgctgccgaacttgccgtacacttgctgcagcaggttcagcgccgccgccatgtccaccagcgagctgccgtttccctccacctcgcactcgtacagactgcgctgggagcccatggtgagcagatccgtgtccaacgggaagaagcccatggccagctcccccgtctggaaccggcctcgcagtcggctgtagtccagcgcgtggtccagcatggtcgtccacctgcccaccacgtagagcgccagtcgccgcttgcgtccgccgtcgtcctcccggcccagcagcttctcagcgtgggccgcgactgccctaacgtcgcccgtgcgcgcgaacgccagatacacgacggtcgtgtcggccgagacgctggccacgtcgtccgcgagctccagacactccaccacgtgatggctcttcaacacgcccaggccgtccacgaacacgtgcgtcagcagcgcggccaggcgcttggtgagcaccagcgacacccgatccgagcccaagtggtccagcaggtgcgtcagcgagcgctcgtactcgtcgcgcagcttctgcagaggcagcacgcccttgtccagcggcggcagcttgaccataatgatccacaggaagcgacgcgaatggatcgggcggacggtatccgaagaggtggcggccgggttaacggggttaaacaagttgaagttgtattgtgctcatggttgtcgaagaagacctaacgattgatcggacttactgctcgttgtggcgcgtaatgtacgtgagcaggtcgatccgcgtgacgacgccgaagatgaccgacttggtctcggcctcgccgcccttgcggatgcgcttctgctccgtgacgaccagcgcgaagtggtcgcggtcgaagatgcggctcagctcgtacagcgacgtctgcgggttcacctgcttgaactgcttgaacatggccttctcgacggcgtcggtcgggcgcacgcggccgggcatgagctgcgcgatgaggttgccctcggacacgacgcccacgatcgagttgtcgtcggccacgaccggcaggttgtcgaagccctccttcttgaggatgtccacggcctccttgcacgtgaggtcgggcgtgatggtcacgggcgcctgcagcagcagctccgacacgttcttcttggcccaccacgtcgcgctcagcgcgctcttggacatgtccgtcacgtagccgtgctcgtacatccagtcgtccgacaggaacttggacatgtagttgcgcgtcgagtcggggagcaccacgacgcagcgctggccggccttgaggtccttggcggccttgagcgcagcagcgatcgcagagccgcacgagccgccgcacagcaggccctcctcgcggatgaggcggcgcgccagcaggaacgactcctggtcgcccgtcttgatccagcggtccacgagcgagcggtccagcacctgcgggatgaagtcgtagccgatgccctcgacctggtacgactgcaggcggttctcgtcgttgaggttctcgggctcggccaggatggagccgatggggtcggcgcccacgacgatgcagctcgggcacttctccttgatcttgcgggccgtgcccgagagggtgccgccggtgccggcgcccatgacgaccatgtcgacgtggccgccgcaggcctcgaggatctcctcggccgtgccgtcgtagtgggccagcgggttggacgggttgctgtactggtccaggatgtgcgcgttcgggatctccttgacgaggcgcttggccacgccgatgtgcgactcgggcgagtcccaggccgcctcggtgggcgtgcggatgatctcggcgcccagcgccttgagcacgtccaccttctcgagcgacatcttctccggcagcgtgatgatgatgcggaagccgtagagcgcggcggccagcgccaggccgatgcccgtgttgcccgacgtgggctcgatgagcgtgtcgcccggcttgatgcggcccgaggccatggcgtcctcgatcatgcgcttgccgatgcggtccttgacggagccgccggcgttgaagaactcgcacttggccagcagctcgcactcgaggccggccttgcgcgcgatcgtgttgagccgcacgagcggcgtgttgcccacgtggtccaggatcgagctgaggatcttgggctcggcctggcgcggccggtgcacgtgcggctgctgcacgaagcacgtctcgggcgacgcgcacggcgccgaagcggtcacctgcgggccggcggaggagggggaagccatgctgatctgtggacgaacggagggggcgacgcggcaggttgaggaatggtgaacccatgagccgttaccgtaccgggaaagtttcggtaattttgagactctaccgatgaattccagcttcaacgtttgtgttacttcagcgaaaccacttgacgtttgtatgcaagactaaaagtaccgattaagtaccggtgaattgtcgacgaactgagccaagtccatgcacggcacgggatccgctggacgccgtcagcttctgcttgctttgcgcccggtgctttcccgcgcgcgatagattcaaaagggcaacggccgaacgggtggacgtggtgcggctggggcctgcgacggcgtatcaggaggctcgactggcgcgtcacataggacacgctgtcggcgattgtgccaattgcgttcgtctacaggtcttagtcagagcctgcggttgacgttgcagctcccgctaacgtcaacgtggttgtgtgatactcccattcaagcctcagacagcagcgagctgggcgaggaggtcggtcgcaggcagcgcttgaagtcttcgagcgcgcgcaggaactccagtcgcttggcctcgtcgagacgcggggtccggtttgatgctgccgttggggctggagctggaggcggagacgtcggtgtctcggactcctgctgctgctgctggcaggcggcgtgttgctcatctcggatgcgagccattgtcttagtcacggcactcttgacgacttggagcgcacgcatggggtctgcggggccagattgtcgagacgccgtatcttctgcagcctggtcctcgctgcacgcgctatttgtgctcgaagacaaggaagcgagcgagatgccatcgtcgcgattacttagccacgtccacagagactcacgttggagcactagagcatcgggctctgcatcgaattgatcgaaaggctgggcggctccgtcttgattgcgattcgtcgtatcgtcatcaacaacagcattgtcgttgtcttcaacctggtttccaggctcgaacccctcactgcaaccagttaccgcttgctttgagtactctattgacggttcatcccaaaccttcagactttgcttgcttggctcggctgcttgaggtgaaaatgttggcagcgtcaaaggtataaagccgtcagagtacccgttgaggtgatttgcagtttggccgtggtgtcggtcgcacagcagactccgagctagagcgaggtcgcccacgctgatcagatcatttcgcgagagagcggaatccactgtactggaagcttcaccaaagtccgagaaaaccacgaatcggtccagcagcgctgggctagaacgggcttcgcttccagctaagttgtgatctgctggttgtttgagctcatcaatagcactcgaagtgctaccagcctgccgaggactccttacaccacagtcagattggctttccgatcgatcatcaagcatttgtgctgctgaatctgctttgtcttcggttggcgagctgctggatgctgctttagattcctttcgacggcggcactttgtgcgtgcacgagcaaaattttctcgcgtcttggaagtttttcttgctggaaagaccaaatctgcattgttacggctcctccgcttccataacgaaacccgagccatcttccgctttcgcgctgtcgttgcagcatcctttcttcgagaccggggaagtacatttcgaggcgagtgcacggtgggtgacatcgtctcagacacgttattgtcgagtacagctacctcgtgaggagctggatattcaagttgacggctcgttggtcgctttcttcgagcatctcggagcgtagtaattcgttcagcttcgatccgctggataatttgttccggacgcttccagataagctcgtcttcatccaaggagaagcctttgcggacagaatcttggaggtcgccaatgcgtcgtccttcttccagaaagacaagttcatggtccgtccacgggtgactaatgtggctcgatgcgatctcgtcagaatatcgttcgtgggttgctgcagcgccaccttcatttacactgccaagtacatgaaccgttgtgtcgcactgctcgtttggatgcgataactgggtttcccgcaggggtggctgaagcacttccggactcttcatgctcaccgtagggaataaaggagtgacagcttccatcttgtcgacaacaagcgtaactttgggctcattaatctcaccgctgtgctgctggtttcttcggcggaaacgaacgataagtctgcgtcttcgccacattcgctgaattagcaacacggcattcatgacttcaataaccgtgctgatgctcgacggaaccttttccgctaccagttttactttcacgtccccttcctgttgatcttgccctggtatctttactgcgggtggtgttgacggtgagaatggaatcactggcattactggcttcgcatgcggaaccggaggggagcttgtcgatgcagctatcggtttggggagcggggacggcgacgctcctcggcttgtcttccttggcgatggcatcatgtgtatggcgaggcttgatgatgtcgactgaacctgagcgactggactaacgtggtgtcttccaggaagtgtgtaggtgactgagctttgaattcccctatcggggtgtttcctggtgtgctggtcgtgttcagcttctgcatgcctcaaacgcttcgcttcttgaattttatctatcaatgaccgagccaacgattgcgacggccctgctgttaccgggtgcactgaggcaccttttcttgaagtatgtggagatctgtgcgaggtcgttagcgagtgctgagtcttgtcgtgattcgctcccaactgcttcatctgtaccaaattcaccaaacgactccaagtcagccaaagtagcatcggtagcgcatacgggcagctcgtacatgcttctgaaatcgtgacaacgggctttccggctgagaagcaccatcaccactaagcgcagtagtggcattggatgctgtatcaatcggtatccgagttccggttggcttttcgtgttcgtgacgcgtcacctcggcgcgtttagtcctcggttcgggtttggatctccccgactccattccaccgggacccgccccagaccgagggcctggtatcctgcttcgagcgtcgacatcgttggacagatacgcctgcagtgctgcagttgctaccagtggtgtgggcgtgatacgactctcactccttgtcctggtttcggtctgcggtcttctcaacttcatcgaacctcggaccggagactttatcggctcggagacatccgaagtgcgagcgccttgacgcagcccgttctcccatcgccgttcgtcaggtgtgcctcgcttcattctcaacgcgatatctcgacgtcgtggtggaccggtgaacgaagcgacgctgagagaaactgctaataacttcgactcggcccgatccaagtcgcaccgtgatgcggcggcacaggacatcgctgtctctgatcgctgcagtgctcgcgttgaccgtatcaccaaccactgcagcggacgagtcctgtcctaacgggtgctcgggcaatggggtttgcgacaagaagctgacttgccaatgccacgacggcttcttcgggtacgactgctcgctccagtattgccccgtcggcaaggcgtggggggttatcacaggggtcaacgaggctcatggaccggaagagtgctccggtcgagggacgtgcgtctacacgagcggttcgtgcgcctgccagtcgggattcactggccccacctgccagtacacgcagtgtctcgattcctgctccgaccacggcaagtgcatctccatgaagactctggcggagaacgaggtgatctcgcgcgagctgttcgaccgcgacgtgttcgtctacgagcagatctgggacttcgacgtgatgcacggatgtctctgtgacgagggattccatggccctagctgctcgctgaaagactgccctgttggtgatgacccattaaccacagggcaagttaacgaagtacagctactccagtgcctgacaacgtaccagcagcagacgatcgtgctgcagtcggacgccccactcaccaaaggcaagttcatcctcaagttcgggagtcagtacactcgcccgatatcgttcaaggctctggctgatcaagacgctttcggtccttcaattgccacgtcgttgctggccctgagaggtctggatgcagtcacagtaactcgagcagacccactaccaacccgaaccgagtggagcgtgaccttccccatgactaacacgaagcacaacgcagtcgttccggggtggagaacggtagaagtccagcagttcatttgtgctgccgactccggagtgttcgcgatcaccttcggcaacgagacgatccgcaacatcccgtacaatgccgacagcaacacgttcctttcatacctgtccaagctctccttctatggccagatgagcgtggcgctgatgaccagcactgggggctccatcaacaacatttgcacccctacggggacattcgtgaccatgacgttttccaccctttggcaccgagaactgctggcggatctaccagcgatgaccttctcaactctggacctcaagggcgttcagaccttgttccgcaacaacgccaacgggttcatcgacacggaaaccaaggaggtcatcaaaggtttcgactcgtgtcgcgtcacggaggagcagcaatttctgtgtggagctaccagcggcaactttgctctcacgttcgaggacggcacgaagctgaccgggctacccttcagcatcacagcagacacgctcaagtcgacgattcagagcaaggtcccgtacattgtggacattgacgtcatgtatgcgggtgggttgaccacgttctgcagcgatttcggcacgactacaaccatccgctttgtggtggtgaaggcgaccagcggagacggagacctcgctgagattctgacggattcgacgaacggaggcacggacggccttgtgcatctttccaaccgcctgcagtttgcttcaagcttcacggagactgtcaaaggcgcgctttgtgagccactggaccagaccttcaccccagcttcaacatcgcagatgctggcgcctgtgctacaaggtggcggagcgtttaccgtacgctttcggggagctacaactcgccccatcgaggcccaatcaaccacgcagcagctgaaagggcttctactggaactgcccaccattcagggcgtcgacgtgagctactcgggctcacaagcgtgcgaaaccccggcgaacctcgcgaggatcacgttcacccagaacttcggagagtaagtcggccatgactgcttgtcgattgttattcggtgctaacctctcttgttgtctcactctagcctctcaactatcgtggccgatggcagcatgatgagcgccgggtccactgttgccgttgctggcgacggcgcagccatcggagatgtcgtgtcggtggacggcaccaaagagagcgaggtttgctcgaaccggggctactgcgacgacgtcaccatcggtcgctgcatctgccacacaggctacaccaacagcgatggcaacggccagatcggcaccttggacttcaatcgcggcgactgtggcgctccatctcgaatccctgtcgggtgcccgggagacttggcatgcagtggccacggcacgtgctctaagagtccgtcatatcgctgcgcctgtgcaaaaggttggacgggcggagactgctccgtgcgagtttgtccgtttggttactcgtggttcagctaccccagcgacgacaacgttgcgcatcaagtccgtagcgagtgcagtgacgctggcgagtgcgatcgcagcaacggacagtgcaaatgtcaggcgccattcacagggagcgcctgcgagctcagtacgcttgaatttcactgcgtggagccgtgaatcgttacgagaacactaacatctcactctttacctgcttggcagtggcctgtggtggaacagatatcgagtgcaacggcaatgggcgatgcctgacgctatacgacttggctccgatcactcggatcaacggcgtgacccgcggcttcacgtacggcgacgacccgaacgacgtcgccacttgggatgcccgtcgcattcgaacctgcctctgcgacccgttctacttcggctatgactgctcattgagtgagttgaccctgtctacttcactggccaggcgtctgaataactctaacactctgtattgccttcattagaggagtgtccacgcggcgacgacttctacacggacgacgacaaagtcgagcgccaactgatccagtgcatcgccgacacgggcagcttcacgctcacgttccgagacgcaacgacagtcaacatcgccgtctcggccaccgctgacaccgtgaaggccgcactggacgagctgccgacaatcggacaagtggccgtctcgctcgtgggcgggactgcggcctgctccaacagcgtcaacaccgtcatcgttgtggacttcctgacggagctgggggacctcccgccgctctcgggctccaaggcgctgctgcaggacagcatcaacggcaacgcgcaggacggctcgggctcgctcgtgttcgccacgggcggggccacgctcctgggccaggcgtccgtcaagggcacgcgcgagaacgccttctgctccaaccacggcgtctgcgacttctccacgggcatctgcacgtgccaccccaactacggcggcagcgacggcaagggcggccccggaaccatcgccaactgcggcttccacgagctcaagtacggcaccggcgccgacggataacgcgaccaatgcagcaacttgaccttgatgtagccatcttctcgtctgtgtgcaaccacgtgtggacgtacgcacgtcgactgtcacatagatttctgccagcagctacgcaagtacaggagcatggcgatcaacgcacagggctgcctgaaccggagcgaactgcggccgctgcggcccccgcgcgtgcccgtggcgcccgcgtactcgcagctgcagcgcgtcagtgcggccgacgcgccgcgcaacgccgacagcctgcggctccgacgcgcagcgggcgtgctgctgctgctcttctgcctgggcaccgccgtcggcctcgtccacgtcatcggcatctcgcagcaggtgctggccaggctggaagcgcagcagccgagtctgctgcaccagccccacacgcagtcgcgcgacgtggtccgaggggcctggcagcgcccaggcgagggcgccaacgtcctcatcgcgtactccgacgacggcacgcacctgtcgaagctcgcagcggccgtggaagtgggcacgcgcaacgcgctgggcaacgagacgacgtctctgcgcgtccgcacgctggagaacgcctcgttcgcagaagacgtcatgtgggcggacgcggtggtgctgggcacccacgtcgtgaacgccaacgtcgagccgaaggttcgtacgcctggtataaccgtacttcatgtagtagtgtctgtatggactaactgtgtttgcttgctgctgctgcctcttgcagatggccaagttcctgagcgattggtcgttcacggaggatctgagccagaaggttggcgcagtgttcgtcacgagtggaggactctccgcaggtgaggaactgacgatggtcaacctgctgcactcgctcatgatcttccgcatgatcatcgtcggcggcgagcgctggacgagcgcgtttggcgcgtccgccattgtgggcgaaggaccctttgagccagcggggcaaaacagcccggagacgcgcgacttcccgccgatctgctacccgacagacccggacgccattcacgacatgttcagggacaaagcaattggcctgggggagcgagttgcttcgatcgcgtcgcaactgcggcgcgcacggagggatctattaagacaggactagccttctcctatcttacaccgcatttgcggtgcctacaagttgctgaatatattgaagtgggccccagcttgctcacatgttttgatgctgccaggtcacatctcgttaaggaatttgtttgctcgttcgaaggtccaaaacgtgatggcagcgctcgggattccacgcgagaaggccgcctgccagcctcggaagagctgcatgacgccttcttcccgcaccaacttggctgtgctcgagacgaggcccgtgtacttgccatctcttccgtcggcttgaatcagcgacttgatcgtgtcgaacggcagtgccaccgcccagaagctgacgcctccgaaggccccagcagtcagcagcgtcgccgtctcccccaacctcccgcttgcagtgaggcgctgcttggcgaagtcgtagcccaagaagtagaaggccacgcccagcgagtctcggatgacggtagtggtgagccccttccacatggccgcgatgccctcgttgcgcacaacttgcgtgacgcagtgatacgcccctcggtacctccgcgacgctggctggttgtcgtactggacctgcaggcggttgcgcacgagctccacgggcgccacgaggaaggcgttgacgccgcccgccaccgcccccgccgtcagcgacactaccgtcggcgtgagcaccagctgcagtagcggcacgtggggcagcacgtcgttgcgcagcgtggaggacgtggtgaagatgacggccttgtacaccccctggctgaagaagggcggcaggaagcccttatacaggccgcgcattgactcctgctggacggtctgctgcgcgcagtggaagaacccgcagaagcgcgcgggcgacagctgcaggcgcgtgcggatggtgtcaaaagggtggcacgccaccacgctcgccatgcccgagacggacccggcggccaccgacttggtccatggcgacagcgacagcgaggaccggcgcgcaggcgaggagctcatgccggcgttggccgtttgatacaaaaagtgaagctcagctgctattttgtgcggctggcaagaacctgttagaatggatccctgcgacaccggaacaaagttaaggttttgtgtaggaatagtaaatctaggaatatatatcctgatataaccgatttggtcaatcacaaactcgacgtcatcgacttcaagcaacgcacttcaacgtgttgacgtcgtacattcattaaacggatcctctgagctcgattctgctgccctccattggggcactgccagccacagccaggccggcagcctacaggcgcgaggccgcgtcgtgggcgtacacgaactcgccgccgtcgacgatcacgacgccgcgctccttgaccacggcctggaacagcaccttgccattgccctcctgccacatgcgggtctggatggtctcgcccgggaagcacgggctcgagaagcgcacgcggatggacttgaagcgcgccgcgtcgccgccgcagaactgcttgtacagcgcgcggctggccacgcccatggagcagaggccgtgcaggatcggctgcttaaagcccacgctcttggcgacctccgggtcaatgtgcagcaagttgtagtcactgcgggggcggcaacagcagcaagggaacagacaacacacccagtcagtaactagcccagctcaacgtcaaacacactgctcgtatgaactcaccccgacagccggtacacttgagcctggtgcggcgaggtcttgaactcgtcgaagaagtcgggctggcgcttggggatctgcacgcgcgccggcagcttgcgtcccttgccctcgtagcccgtgagcccgcggatgaaggagccgctgacgagcctggctacgggtccgttggcgtcctcgaactgcgtctgcgtctccatgagcgtgcccttgcccttgtcgtagaacgagatgaccttggtcttgcccgtgagggtgccgcccgcggggtccagcggccgcaggatctccaccgactgctcgccgtgcaggatcatggccgggttgaagctgggcatgccgtcgggcgcggccgagatggtctcgggcgggaagggcaccacgtcctgcgactggcccttgaagggcaggcacacggggtagagcgggaaggccgagaagcgctcgtcgaactcgtacgtgaactgcagcgccgactcgccgatgcccacggcgtacagcagcaggtcgcgctggttgtagctggccgtgtacgtggcctcggggctcttcaggatgcggtccacgtccacgcgcatggctggcaggaggtcaaaaagggctgcgggcttgctatcgactcggcaaattcggaagtgagccaagagcagagctgacgttgaaccaggcggggctttgttgacacgacacacaagtgtaccgttgagctggtacatggcatggtgtggcgcacactatttgatgtagaagctgggttgtagcgtcgcgtggatgtatgagtctcacattgcgattttcgagcacaagccgccagaccatcggaaggaactcgacaatggcggggctgggacgcttcttcatcttcggcgtggcgctcgtggtggcgctcgtggcgctggcctggccgcagatcgagcagcagctcgtcgccagcggctacagctgcccgtaccccttctccatgctgctcacgggcaagggcgccgagaaggaggcggcggcggaggccgaggggctgcccaagtacacgctggaccagctgcgcatgtgcgtaaatagagctagtgtcgtattggttgcattcattgtactaactgtggtggtggtgctgctgctgttgcaggtacgacggctcggacgaggagaagcccatcctgctggcggtcggcggcaaggtacgaggcgtcggaggctgcaggatgcgcggaggagcggtcggtatcattaacagggtgctgctggctgggtgtttgctgctgcaggtgctggacgtgacgtcgggcgccaagttctacgccaagggcaagtcgtacaaccagttcgccggaacggtacggtggccacaggactgatttgtctgattgactgggtttagtggatagttgacacgcgtctgtggactggtttgtgctgtgtatctgctgttactgcaggcctgcacgcgtgcgctggctctgggttcgcttaagaaggaggtacgagaagctgggatatgtgtgtggaggatctttggctttgcccttgtgacgattttttttcgtgtcggtggtggtgagtaggatatcagcgacgataccgcggacttcgacgacaagaagctgaaggagctggacgagaccaaggagttctactacgagaagtacccgatcgtacgtcgctctgcaaactggcaaacattttctcgcgatctaacctgtggttgctggggtggcaggtcggagaacttgcttaagaatgcggtcgacgctgctgctttcaacgtgaaagcactgcatagatgctagaaccagtggtcagtggtcgtggcaggctcaaaatgaagccaatacatacatgcactaaaacttttcatgatattcattcccgaccgaccccagttgctgatgatttctatcacggcatcgccaacgtctcccctcaattctaacaagctgctcaaatgggcggctccatcgagtgaagattatcggccgtcgtctccttgcggcacaccttcgcgaaatccttgcacaagttgcggaagcgccgcttggagtactctgaaggctgggccgcgagcgacagccacaagtgcagcacttgctgccgatcttcaggccgaagttctgtcacacccagctcatcgcggctcaacgactgcataagcgaagccctaacacgctcgttatccgcgaagctggtcagcagcgcgtacaacagcttgcccaacgactcgaacaacccgctcggactctttgaggctagcgcacccacgagactgtcgagccacttttcggtctggccagcgtccagcacactggcgttgataacggctgtgaacactgccaacttgaacgtgctctcgttgagtaaataagtgaggaacatgatgaccgcgttcgtggatggtcggtcctggttgccaagacaagccagactcagctcgatcagcacggggaactcggccgcagtgagaaccgcagcggggcagaacagcaaaaaccggtaggccagctcaaagaacgaacgcaaaacctccggcgactctgccagcgagtgagtcgtgaagaactggaacgctgactggctcagcgcgcccataagtcctcggaagctctcaacaatctctgcgctggcatccttcccaaagacatcgactgccacagacgcacattcgagtggagccacgtagcgtctctcctcgaaaactttcacaatcaaagtcgcgatgttcccaagctgcggcgccatctcctgccgcaaactctgcagacaccacccatatagctcgaacaaggctgtcatcgcagcctcatcagcctcaaagcggggtgtgatcggatccaagtgaggccagatcagttgaacagcccacgtcgtgacagccttgcctcctgctacgtcttcaggcgcgtccaagaaccgcataaccttgccgagcacttgaagctcgctgcacaccgggacagccacagccgagtcatcagtgcccgtagccgccagcacttggtccagacgagtcagtgaatcactcagcacggtctgcaagattagcgagcagtgaggcgagacggcagcgccacgtacgagaccctccacgaccagcaaccgatcctcaatcggcatgggctcttgtccagccgcacctccaaaatgctgcacactagccaccaggacgctgggttgcatctcggctaggcatcccgtacagcttgttgcaagttgcataaaactcctagcggcatttgcgcggctagcggcgagtccaagcgctcccgtcagatactggagcacagcgctgactgtctcaaatgcacgagccgctagtgctctatcgttgatccatccactaaactggcccagcagtcgtgaggctgtcgtaattaccaaagggtgtgcactagccgtcgagcctagtaccgcctggaaaatttgcgacatcatcgtctccaattctgcttgctgcgcggtagttgctgcagccttcgggagttttttcttgatatcgtctgctacgatggagacggcgagcagagcaacctcggcattctgccagtcgctcgacgctgctgacgtcagaatcggcagcaagtgagcaaggaaccgctccttaagcagcgcgaaaatggctaggaacgaatctgatacaccctggaagccgctacggaaagccaagaggtcatctcgttccagctcgtccatctcgtcagcgtttccagcaggaaaggcacactgcttgagcaaaacgtcaaaaagttgcatgaaggcatcgtgctgataaaagcgcagtcgtgacgccacaggctcgtcctgcacgaccagccaaaactccagcgtgagcgacgcgatctgtcggcgcggatgggagccaagatacagcataaattcaccgagagcggcagcttcctgggggtgctcgccctctaaaatccaatcagcgtacgtttcacaaaacgtagagatcacatctgtgagcgcgtggctcacttcgtcttcctctgcagcacgcgcactttcacaggccgctcgggtcttcagcagtccttgtgccacaaccagcacggtcttctccagctgagccggcgtcgggtatgacgcgaccgtggtaagcttcgacaggatctctgcacagatctgcagatgcctcgacttgctctgaagtgcctccaatagagccatcagcacagcctcgtccttggagtacagggtcgccaacgagagtcccgcgcgcttgacccacacctttaagcacccgagcgcctcaccatggagcgctgccactcgagcgtcctgatcttcgcgtgtgagaataatcttcccgatcagcgccaccaagtcttcactcaagattgcgaggttcagctccattgcgtccttcgcagcgaaagccagctcggcgttctccatctcctcgcagacgcagcgcgagatggccagcaagaacgcgatctcccctgcgtcccccgtagccgagcagctcgccagcagctgcgacaacagagccttgcagtcgttcggggccgagaccatggccaccgcgtagatggcgcagagcttgctggccagcgggccctggtggaaaccgagcctggtcccggcgcgcagcacctgcatgattctctgcagcgacgccgtcatggccgccttctgctctgccgacagccgtacccactccttgcgcaccttggtgtgcagcatgttggccgcgaagaagagcgcctcgggcggcagcgccagcgactcgtcctccagcagctggaaggcgacgccccaggccgcctccgaggccgcgaagctgttgaggaactcgttggcttctcgctgtcgcgctgctccttcctgtgcggaaatacacacgagagtgacaattagttcacagctgcataacggaggaaaaggagagtcgttgagaggcggcggttgcgcggttggcattgcaaatgcacgcaccatgccgtagagcgcctggacggcgctcagcaccatcgggagcgggttctccgccatctccgtcgtgcagccctgagcttctggcgaagagatctgtaaagtgaaagtgagctggcaaatgaggctttttacagttagttttagccaatcagatgattttaattgtcgaaactcacaagtttaaaaagttgtgagcaaaaaatgataacgtaccattcggagcggtggcttgacagcgatgtcgatggttatgatgaagatgcaagcatacttctacttacactcttgtcgtagattcaacgtcgctcccttgcatccgcgcgacttagcgaaacattagcctcatagagctggcttgtagttttcttcagcgatgctatcgttttggacatattgacatacaagtgctcgctgccctctcgaagttggaggctggatgcacaaatataggtatggaccgaccctcgtccatgctgacgaaaataaaggtaagaccggaatagccaagagcgtgatcactcaatcaactcattctctcataggcgcgacaacaccggccgggctcagacatagaactgcagtgcactgtggcaagggaatgctgtatggggtacggagatgtctctacttggtggtgttcgtgtgggagctggcacaagtggagcttcacggacgaatcagcgccgaccacatgaacaagttacgtccgttcctagatcgagcaagtctcaccaagtcggttctggtctgtctcgccttaccgcttccgtgcgtgatcgtgctggttgcttgcagacctcggaaaatacagtatcatattgaattgcaaaagttcggtctccataataatcatttcaatatatcattcaccaatattgtgctttgcagttattttgccgaccattttagacactaaatatggcaaagcctgctcctaaatatgtgtgaaagaagatacacgacctgctaaaattatgcataaatccacctcctcatatatatatcgacttgggacctgtcagcagccatgcattggcccagtacaccaccgtccttgatccccagcacatccaccctcttatgcataattgccgtgtgtgttggtgcttgtggataaacacggacagaattgcagctgcacagccacaattgcactttcaaaagtgcaattgtggcgcttttagcgtaattctaggcctccacccatttatgcacctcgatttatcgtaaatctagcaggtggtcgctataaatacagcaaatctcgcctcatattgccaaaatcattgcaaagcacaacaagggtgcgttgcgttaggctgggaggactactttaaattccaaaaagtctgctcggttgtatctaaccttagctcgattttaccaactcgagtacaactatatcttccatactggaacactttgaagaaactaatagatgtcttgtttggctacggagtagccaagtgttctgctaatacttcgcttactgagtggtcgagtgttttggcgccactacaaagctaagccaaatccaaaacaacaaccatcaatacatgcgctagcagtaccaaacagtggttacgtactatgttcacatgcaagtagcaaatgaggggcttcgcctctcatttgcagcgcctgaaatttcgactcaatattaaaatttgtgcaaaaggtgatagaaggattcgtgtcgagagcacatatttcaggttcagcagcatttgctagggcactgggccacgacattgttgcctccagcggcggcatggggagtaaggcatccaagcatgctttatgcagcgtgggcagtgtcgcttaagcgacacagaaggcgaccatactccaccagaacaactattaggcagagggcgatgcctacaccggcatcgccttctcgtttacccagtgctatactgacacaattggtgcattcagcgacgtgcatggcagtcagatgctggccgctatcggtggccaaatgcacttggcacaaagccttgtatcaccttttgcacaaaatttcattttgagtcatactccggaattttccttttttatatggagccaactatctactgcccaagagctaaggacgtaagcgtttgcagcgccgaccaccatttttatatgccagcgaggctgcctgagatccaggcggacaggtttaatttgttggcctgcgtggacgtaagacgtcctcagttatccgtcagtaactaggaactacatatacggaatacagtgtagttgtaggctgattggtcatcctgcattctcttgtcgctaacgctgtcctcatttcattttgtgtggtattgcgcgttctagtcgaactttccgaagtcgattgattgaatcgaccgagccaaatcgccagcaaaccgcccgagattttgatttgacttgagtttactatgtacgcagtaaagtacgaaataagaagtcgctcaggccgtctcggtcgattccaaaagacttgaaatttgtattcagcgatttcaacccatatggtaaaccgacccgaatcggcaatattggccagaatttacaataccggtcgggatgtcaatatggctatatttgtgtaggtatggtgtacgattgtgtgagtatggtgtggcgaaatgttgtttaaatgttgcctgaggtacaagcaactgtttttcgacgaattaatctgtctgtgtgaggctgtccatacagctcttctagctgtcctcccaggataatatgtatttatttcaattacttttatttggatattcacgttaaacttggtttttgtatagttaaacattttactgaaaattgggcttcaataatagtaatttcaatacgaccggcaaccaataatacatatttccgtacacaaatccagtaagtgcaatggaataattattttttccgaggcctggttgcttggaggctgttccgttggccccgccggaagaaggtacactagcaaactacgcgtttcggcttcgctacgtcgtgaccttggtcgtgttgactcccggtggcctgtcgatcttccagtcgttcctccctgagttgaatatgctgcgatggtgcttagcattctgggaggaatcacttcaggtggcaccgctttcgcggtttcccttttgatcggcttccccggtcctttcacgctgctcgtcagtataccaggctggtttgctgccatcgttccaccgactgtagccatctacgttactcgacttcggcacgatcaagcgctcttccggcggtttatttgctgttggttgatgttaatatggcttgctctgtcggtgataatctaccccatctacgtgtttggtttccaccgacttgggtcgctctggcaagtggtctacattagcgttttccccctggtgaagatcctgggtcgaaacgatatcagctggctggttggtgacgatttcgatgtgaaggctgggatcgtgattttcaacgtggatctttatcaaaaggggccacaaatcatcagcactttaacaaacctgtcaaagagttggacttagcgcagtaccgtaagaagtaccgtcgttagccaattgctgcccaggcgaccggtacgttgcagcacaagtgtcaaactgcaacgcaactcaagtagcggaacgcgtcgcaacgaagtctaagctaggcacgttttgcggtttcattacagagctgccgcagatacgtacatgtatcaaaccaattgactagtagtccattacgtacttactcacaggacttcgtacgacctcaaagaaatatcacgatccattggatcgccatcgagtttgctagattcgaggccttggtcagcatatggggtacgttgagcatgcatattgtaaattaattattaaaagtaagctatggcaaaccagcaatgcatccgaaacgacttaagcgtgccgaaacttgtgcagcctccgaagaatggcttggattaccggtgtggaacgttcgccacaggacaacacccagttggttgcatactcatgccttcgcgatcagcaaaaaataaactagcgctgcttgtgtgccgtcctaattgcttttcaagattaacataggcgctgccaagttgtagatcgagacgcggtatttagaatttgtcgcgatttaaaacgttatgtaaccccgcgagatttattctgctcaacagcgtcctctcttcgatacctttgcgtcacttattgcgcgttttagctataaaacaaacttattataatactgcaagttagaaatggatccgaggaatgcttacatgaaggagcttcataaagctaataagcggaagatcactgccgcctggacatcaattggctatcgacggtacttcttacggtactgcgctaagtccaactctttgacaggtttgtggccccaaaatttggggccatttgctgatggatttgtggccccttttgataaagatcctttcaacattgaagtctgcagctcgctgtacatgtctgtcgcgttggagaactcggcaaaactctcgacaacatttaccgcggtagcaattgatattcttcaatcggtggtggccatatcggatgtgagcaagatgatgagaggcatcaatcggatcattctctctggtggggcccgaaccgccgcactcgggctacgagcgtattacgtacgacaaccgcactcacagcttcgcgtcgatctgtaagacggacagcaacaaccgcctcatcccgccgaacaactgggacgcgaccatctaccccgtggacctcgctgcctccaacctcggcgacatcgtgtcgcctcgagcggcaagtactggtctactgtgagcaacggcaacggcgacaacgccaaggtgcacctgctccaccacgacctcaagtcgaaggccagccaggacattgtcctcggtggcacgagccgcaacgagcgtgctcctcaccttgctgctatgggcaagaacggcatgctcgctatgtgggagggcagctcggctggcggcgacctccaggagggcggtgactgcacgatcttcgctcaggtgcttgaccgtgccacgggcaaggctctgagccagaaggtcacggttgacaagtcggtggtgggcaaccgctaccaggccctcaagtccttcccggacggcagcgtggcgtacctgtcgaagggcaagaccgaccagtcggtgcaggtcgtgcgcttcttcggctgctagaaaagcaaatagattcgcaccatgtcgggatcgatcatgcgtttaggatgtagatgaggttttgaaagaaactaaatcaatggaacaaacaccagcagctttcgaatgttgcttctcagtacccacggccccattcctatcgtgaaagtggcgtctcggccgagtgtagcgatatctgagccacaaggtaacagctcgctattacgaacggcacggatacatcccgcaacgagtggcggatcccctcgggcttcgaaacaaaatgatatacgtggcaacgcagttgttgagaaccaactaaacgtcgacaacgttcaagctcacaaccttacatctgtggtaactcaatcgtttgtgtcgaccaaggatcagaaacgctttgcaagaaaatcagctcgatttctctacacggctgagtttgtgctgctcgtcaagtacgtcgaagcgatcgtgcccgcaatctacagtgcgttcaaatatcgttagttggcagatcatttttgtgtgactttgctgactttcacaaacaaatttgtcgagtcgcaggcgccatcgctgtgatcgcgtacaacattggacatcgggaatattacaaccagttcgagtccatgacgtcggagaacctgcacgacatcgtcctcaacgtgatgctctactgtctgctcaagatactctccttctgtgtcttgtgcgtcgtgcttattcgcagaatgggcctctccgccatccacctcgtcgcctttgtgctgggaagtagttttcagcagaattttgctcagggtggtctacacgacgctgacgtcgctcaagcattcaggtacgggtcactatgctgctctaaacaaaggctggtctaaccgttggatatctaactttctggtgaacgaccaggtcccgatttcacttttcggctcgcggctcatccacatgactaggggcggattttcagtcaaaatggggcatgcccccattgtttaccccccccccccccccccattttttttcactttggcgccattttttatttttgacaggcgccgatcatgcagagcatcatggagttcttccggcctgtgcgcaaggacaaacgcaaacgcggggatgctgtagtcgacttgacagcggaggaggactcgcatgtggctccagcgccacctcctccctccaaagacgacgtcaaccacacgatcaagcccgacgattccaccggaaagtccgcgacaactggcatttctgagcctcgcgcgaagcggcaggcagtgcaaagcagaaccaagcgcaaatctacaagccaagaccctccaccgccaactgagtcggtgtatgcagtcggccaacccgttgagctctcggagtacgaacaaaagcggcaggcgaagatggcggccaacgccaagttcctggagcagttggggatgtccgccgcccaattgaacatgacgcgtcaactgcagagcaatcaacagccgagagaagccccagtgaagagaccgaagaggcagctgcaggaggtgcaacctgtgcggaggtccaggcggctacgtggagagactgcgccagggtcagcgccgccaccgagggcgatcgaagaggacgacggtgacgagtctgctggacctgatccgttcgaggtggaggcttcattcgccgagtccaatgtccttcgctactctgtcaatgggaacacagacgccaggaaggcgccccctttatcgacgatgaacagtccgggccaggaactcgtgggcttccaagtggacccaaggtcctatttgctcgatgacagcctcaagaaggcgtacgctatctcctttactccgttcaaggagcacggacttgtcgcagccggtggccatggcggtcatgtgtccatcttcccgttctccaactcgtaccatcaaccggagatcgtcgacgggtttgtcgatgaccctggtgcgcacattccgctcatgtcctttaaagcccatagtgggtgggtagctgcggtcagtctggcgaaaagtgagcaaggcagagcgaatgtgcttttgacggcgtcgaacgatggatctgtcaagctatgggacttgaacaagagctcggatatgctgcgtaccccgaaggaagtattcgcctgcacgaacctgcaccagaagggaatctttggtatggacgtcagtggcgactcggtcttgacgtgctcgaaagacgccaccgtcgctctgtcgaagtttcgcggcgacagtagcccgctggaggtggtgcggcgctttgagggtcacgagggcgtcgtgaaatgtgcgaggtttgctaacgtgaacccttatgtgtttgcgtcgggtggaaacgataggtcggtgcgcgtgttcgatgtgcgcgtctccacggatcccaatgtcatccggattgacggcgctcagtctcgcgcgatcaacagcgtccaattccacccgacggatgacaacttgctgttgtcagcaggcttcgacccagacttcttcatgttcgacttgcgcaaggcgtccgctcctgtctgcacctttcgcaaatcgcctcaatccagggacagcaaagcgattttccaccccgttttcgtgtgtggcgggcacggcgtcgtcgcagctcgcgggcaggatctctcgctgtacagaacaagtgacggcgccgcaatcagccgaggttacatcagtgatgctgccacgtgcatcgctgccgacccgttccacgaccgcatcgctattgctcaaggaggctacgtgcgattcgcagacgcgcagtggaagcacaaggcgatatagattagattttatcgctaatatctcaatttcacctagccagtcagcccaaggtgaggctaggatgcgggcacgtgcgacttcaaccattcgttttcctgacgcaacgaccggttttcctccaccacagcgttgaagcgatccatcaaagtctcaagcaagctggaaagctggtcgacctcctcctgacgccgcaactccatttcctcccctaaacgctggatctcggcgcgtatggtagtgctcccgaaatctgcttgccttggcggagagtttccaggataaaagctgctgctgttcgtctcgttcgacgggtttcgtgataaagtggacaggaatgataccggggacggctcggattgtcgcctctcgtctgcgggttgtgcaactgacccaaagtccgagcgctggggactaagggggttgacgaatggccggctagaaggctgctttgtgaagccgtttaagtgactcggtggtgatgcaggttcaggaggttccgctgctcaattcaagtcaaagaagtgtcagaaagttggaacatgccacgaaggattgacattgcggtacacacccgatcgagtggcacaccgagtgggggacgctggcggtgatgatctggcctcggagttcaggtcctggggcttccttgttgggcttcccatgcctagcgtttcgagctttcgcagtgcgatctcttgcagtgtcgctcctttgcagggcgatacatgctcagccgacaccacgggtaacccttccggaatcattcccgtggtagcgctatcgggaatcggcggtgaaaactgcagcgattgcactgctgaggtttcgtgcacgagcgtggagaagagcggcgtgatcgctcctcgaaggtcgtacacaagaatctcgcccgttgtggtccccatggcaagcgttttcccatcagcacacagcgccaacgacgacacaggttgctccaagtctaacgatcgcagctccctatcataacgaaggaacgcgagttagcgtatcatggcgtacacgacaacatcgactaaggtgacatacttccgctgaagggtatcgtagaaaatcactcggccgtcgaggcctcctgtcgcgagcaagactttgcttacgggcgagagcgttaacgcggttgaaggcgcctcgtgctgtcgtacaaactccgcggtcatttggcccgtactcaagtcccaaacacgcacggaaccgtccgagtacgtagagccaagagcgtgacgagcgtacggatgcggagacgcctgaatcgccataactttgtgcacctaatcgttgacgtgaaaatggttaaaccagcagtcaaaagcattgtgacggagcatcaggcgtaccccgtgagctggatccactgtaagaaatcccgctgtctccgctgtttggacatcgcatacagaaattgccccactgcagagcatccacgaccaggtttagatacaaattgtcgatgtacatggagatggcagtcgtaccttgcgctgcctccaacgatgtattcgtccttgtagccgctaaatgctacggacgtgacagcactcgcgctgatattgtacgtctgcatgacttcctgcgtcttgaggtcccatagctgcaatcggcgccatgtgagtgagcattgctcgtcgcgatgaaataacacacaacactcactcgtataaagccatcgctgccaccggacgcaagaaaccttgagccgctgctgaactgcactgcatttactcgctgcaattcctcaaacccattagacaaatgcgcttcacacgatactctcgtccagcgagctgacgtactcggttcgcgggtgtttcacctggatagaagaacctcgacagcagctcgcccgaggacgcgacgtccagacagatcccgccttccgcgctgctgctcgccaatattctgccgttgtggttgtaccggacgcacgtcacgtcggcattgagagagctgagcgtgcgctggtgcgtgatggcctccgaggtgacctcgaaggtcttgaccacgggtccagccgcgcaacacagaaacatgctcaacaactctgtagccccgtggcactgccaccacgatagacgctagcacacaagcaggcactgcgctgctcaattgcccgagcaatggggcagacgatcgctcgcgtcgtttcgtgtcgagattgcagatggctacattttcgacgtacttagcgcgaactgaagattggctcgacaagctcaagaccaagatggcgctgctgcagacgctccggaagacggcgagccacgggctgcgcgcggcacctcgcagctccgcgctgtactgtacgtgtagttgcgtatcttgagctgttgctgcctgctgctcgcgtctcatcccgtgctctactcgctgcaattcagccacggagcgcgtgttccccaacttctcggtgtacggaagcgactcggccttccaggtggcccccagcgccccgcagtacaccagcgcgggcagctacatgaagatgaagcgtgtggtgagcagagcgacgaattaatgggctcttatcagctaatagtgaggagttgtgttgctaaatgagctcgtgggtgtgtgcatcagggcgccatcatgctgtcgtgggccaaggccaccaactcgggctacaactaccagaataagacggtgagctactgcttcgatggactcttatggtgtggagcagtgatgggctgacggctctcgtgtgcttgcagttcttctcgctgagcccgacggaggtgggactggtgctcgagctgctggactcgcggatcccggagctgtcgttcacgcactcgcccaacatgaacgcgtcggaggaggacaagaactccaagacgctgcatatcacgcgcgcgtcgggctcggacggaaaccccttggtgctgatcaaggtcaaccacgagggcgagtctgtcgctacgctgaacgtgggcgaggctcgggtcttccgggtaagtggacaacgctgaatcgtatgactgctgcatctaacatctaccgcccacgtgtcccctgtaggaattgctgacgtactctcttcctcggctcttcggcttccactcggtgctggaaggacctctgtaagatatgagcagcatccggccacgtgaatctacgtgcatactggagtgctaatgactgttgcaacgatataggaacgtcgagggcggcaacggaggcggcttctcgcagggcggcggcaactcgtactcgtcgggctccaacggcggataccgcggtggcaacaagcctgctggtgactggcccttctaatgcagctgtgagggcgaatgaaccaaagattttggagccctggtgagcttggtgtgttgggggcggctgtcacaagcttcaacaaaataaccaaaatgaagtcgctttgcaaagtagctggtaaagcttgaaaccacgcgagctttacgttttgtatgcttgtcaatagcatgattcacaatacaatgttcatacagtagttgcaggatgagctagaacctgttgctgtttgttagctggctggaatattcatcttgggctgaaagcgttatagcttgggtctctgcaggtgcctgtagaagtggtgctgctcggaaccaagtgcagtagtaactcagtaagccagctcgcgatactccgcacatcagtcgagctcaggcagcgagttgtacgcacggctgcagtgtgcatctagcaactcgaactctttccacatcgctccagacgagatggcgagtggtttaacctcgctgaaacgcgcttttgcgtccgcttgatccttgtttgtctcgatcaccttcttcaactggttcgttgtagcttcgtggccttccttcggacctatctccacttgcaacgagctcgtcttcagcctcttcttcgacttccgagacgacacttcctccatgtcctgcagacagcgttttcggtcgctcttgagcccacttcggagccactgctccatcgtctctggcttgttatctgctgggcgagaatgctttccctcttgttggtgcactttgtgacgagcatcgaccaacgcggcagcctgttgcagacagatcttgtgcagccgcgtgcactctttgagtatctgagcttgcgccttgttcgccagctcaagctccagcagcttctccgttcggtccttcttcatcttgatgagttgctggctctgctgctccagctcgagggtcctggctgtcatgctctccttcagtcggtcgttctcctccttgagctgctggttttctgctgcgagctgctggttgcgagtctccaagcgcttgttgtccatcgccaagacacgctgcaggctgtccagatcctcctcgccttcgacggtagactgcgtgaacgcccactcttccacgcccagaggcgagctggtctccatatcgttgagtattccttccacgcttcgcttcactttttgcaaagtgagcgagcctgccgcaagagcgttggtccttcagttgaagttttgcgaccacaacctggtaatgtgcgacaacaacagcaacagcaacagcagcaaccaccagcgcgtaataggcaaacaaaacagtcaattggaagagttgcagaaaccgagctccttgtgatctctaggccgcggaactaacaacgcggggtcgacgggagagctgcgccgcgggagctgagccgaaacccgggcgatcagcgcgagtgatccacgcggcgtgtcctgactcgcccctcgcctgccttgcctcgtgctattcagttggctgggtgggcgcgtgggttgtttgctatcctccgactcgagctgcactgcgctgcgactctatatctagaatgaaagctgcgcgccgtagccaaacttgaagtcgtccttgagcgggaagccctcggcagagagcgtgagcgcgaagttgggcagcacacgcgactcgatgctcgtcgctacgcggaacgtcgagtccacgctggacacgaaccgtgtctggcccaggtccatctccacgccgcacgtggtctgcgcctcacccgaggcgtggttgtacacgagctcggagccgtagcggatccggtggcccaccttgcgcaggtacgcgagctggaacgtgcccatggcgccgtaggtggccatgcccacccagtcgcgctcgctccacttgccggcgtaggccgagatgaccttgcggtgcttgccgtggtagtaggcctcgccgccaagagccaggttctgcgtgacgctctgcaggtagctgacgccgagcagcgggccgttcgagatcttcatgttccaggtgaagtcctcgccgacgtagtcgaagtcggcgagcgcctgggagccgtgctcctcgttcttgagctgcgacttgacgcgcatcttccagttgcccgagagccgctggttccaccgcgcgtccaggtagccgtcgggtgtgatcttgctcatgaggaaggtggacgggtccatggggtcccccatcacgacgttggcgccgaactggtacagaccgccggggatcatgggcgtgcccagcaggaacgagtgcgacgtggagcagcgcgcgcccaggatgcgcgtgaagtcgaagcggaagccgtcgaaggcgtcggggctcacggggcccttgagctcattgggcgcgttctcgtacaggcccgggttgggcagcttggcgcgctccttctcgatctcctccacctgctgcatgaacacgggcaggtctccctcctgccagtagaacgaacgcggtagaacgcggtagaacaagcaacgtcagagccaagaggtctcaacatcggggctacgcggcacgtacgggagccgcgctggtggccagcacggggtaccgcttgctggctgagcgctcggtcttgctcggtgcactccccatggcgacgggcgtaggggcgtagagacacagagaggggaacaggcagcggtaggcgaagctgggcgctcgaagctcctgctggtgactggagatcgagcggctcaaaagagcgcgcgccaggagaatcgacgcgtcttttccgccaatccagaggcgccattttcgcattttcagccagtaacacgcttgtaagtcgtacttagagagggtgatttggacacaccactctcacttcatgcgcgcatgttgcatcacaattggactgtgcaggtatccgacgtgatggcgagctggctgggcgacgacgacgacgccgcgctgtacacgctggcctacttctcgagcgcctggacgcggcccgtggacgcgttggcgctaacgaggctgcgcgcactgctgggcggcgtcaacgcgctcaatcagcagcaccagctcatcgggctgctggaagttcgtcgccacgaggacggagacgaggacggcgacagcagcagcggcggaggcgccaaagcgcagcgactcgagccatcgtacggatgccgcagcgcagttgcaattgtatttactgtcgtgtttaattgcgtgtgggtgtgcgtgtgtttgatgtcgctgccagaaccttccggtcgctgtgcaagcacttccaagtcacggacctaccggcgtgcgtgctgctggacgcgcaaggacaagcgctgacgcagggctcgcttaaagcgctggaggtggtgcattaggcaattgggcctttaaaatggtgtgatgggttctgacttgctgtggtttgataaacagactgagctccgcgagcttcacgaagaggaggcagctccaacgacctcgagcggatcatcatgtaaggcttgggtattgtctctatattgtctgtttaattgtcgatttttgattgcgtgttgtcgctaggggaagttcttggtgagcttttgaaagacagcgggtccccaggagcagcatggaaggcacttcagccgctgtggcaagttgaagttacctccgcaggcgcagatatccctacgcccatggcagttgataacctggagctggtgaagatgcgtgagaaggctctggagcttttcgaaacggggcaattcctcccggctgcgtcgagctttgtgaacgtcttgctgcgctgccccacgtgcacaaagtccagcttcaatctcgctgccatcctgcaaatgatcggttcgtgcaatttcccaagccttacgacggactcgcaagaattttggggaactaaactcacttgccctattttctttgtgtgtgtaggtgagacgtactttgcagtgtcatgcatgctgcgtgttgtggctcttgacgatagtgactctgttgcgcatacggttctccggtatgtatgtacttagtatgttttgttgctgttgtgatgacagtagcattaaggtctgacttgcttcctttgttcatcgctgcagatccgtgtactatctggaggaacctgatctcgtggtagctgggtatcattcaatcctcgccgagaaccgtgagagtcacgttcgagcggtgcactcacttgcaacgcttgagggggctaccacaaccaagaccgctgctcccgcctacgttgctgaagttttcgacgagcttgcggatacttttgaggagaagctggtggcccacttagagtaccgtgtgccgtggcagcttgtcgaagccttgcaaaagcgttcgcctcccggatttatccccaaaggctcgccgctaaagccggagtgggtcgtggcggatgtcggctgcggcaccggcctctgtggccgtctcctccgtccgcacgtcaagcatatcaccggggtgaggaaagatcgatggtttcaacgcagtgattgaagcagctaacgtcattgtacggtattttccacaggtcgacatttcgcctttgatgattgagaagacacgggccgagggcagttacgacgagcttcagagtacgtatcgtacgcgttcgtcagcactgtttggggccgccctctgatgctgtgttgctgttgtttcttgtactgtacagcggcggatatcgtgccgttcctggagtcgtgcgccgacgaatccttggacctgatcatctcggctgatgtctggatatatgtgggcgcattggagcaagtattcgagttgagtgcccgcaagctccgtgcttccaccgggtggatggccttctcgattgagctgttgcctcaaggcatcatcgacaactctgaggataactcggtcggctatcgtttagctccgtcagggcggttccagcactcgcatgagtacatcgtgactctcgctagtcgcatgagcttcaacatcgctgttaagcaagatatcagtgtgcgcaaggaaagtggcgaaccaattcctggacgcatttacctcctccaacaaactacatgagggtgagtgatcatgttaatcaactcaaagcgaaagctcttcgaacagaaaaactgtcttcggttccggtgcttgtaatgcccaccacagaggggatagataattattacttagggtgaggctatgagcgagctcgtcgttgctggtgcaccacacagcctgtctcgtcctagcgctaatttcgttacgtacaatcaaccagcacgctggatatgttcatgatcgtacaccgccagcttgcgccgttgcatgggaggctgacgcgctgagcacgacgctgttggccttgtcgggctgtacgtccatgagcttgagcagcgtctcgcggtagttccacgacagcaccatctgccggatcctgtcgcccttgaacgtgaagaaggacttgccgctgatgcacaccttcttgtgacggggctcgacgccgaagatcgggaagatctgtgtgccgctgaaggtccacgtggccttcatcttctccgtgctgccttcctctcgctggatgatgtactcctccatgatcccgtccgggaacgcgtccagcagcatgttccagtgcgacatcacagcctccacgccgtgcagcccctccgagtagtccgggctgatgagcgtcacatcctcgtcgtacacgttgtctgcgatctcctcgaggtcctcgatgcctcctgtgttccaggcctccaagatgccgtgcaggatgtcgtatctccgtcggtagatcttctccgcctgctcgttggcctccatctccttcttcacggctgcgatctgctgctcctgtctcttcgccttcttccccacgtgggcgttcccccctgcaagtctgtctgcttcccccctcatgcggtgcagctcggccgtctttctcttgcggtggcggtgggctgtgggcgtcggcatcttctgcagcgtgtgctgctgctgctgcagcggctgcggctccagtttgcactccacgagcgtctgcagctctccagcggcaccagcgccagttccgccgacgtgcggatcgaagcccgcggcctgcaacatgtgcaagtcctgctctgtctcgtagaaaaactcgtggttggatgtgaagatgggcgagtccggcgtggcgttggggctcgcgaagggctcgaggaagtcgtcggccgaggccagcaggaactggtccagatccacgtccatggcggcgtccatgcccgcgaggcccgcggtggcgccgaagcagtcaagcgtctcttcccactcgcgccactcgcagctcgggctgcggcgcatggcggcggaggcggaggacaggaaggtggcggccgaggcgccagacaccacgttgccgagagcttcggcgccggcggaagatgaggcggcggcggcggcgggcgccacgtccagcgggtgcagcggcgacgacgcgcgcatgaagttgaggcgggggctgggcggggcgggcgaggtcggggcggcgagcggcttcctccgcaggctgcaagttcaggaatgaagacctccgtgcctgctcgtgtgcggcagcgagccatcgtcctgaccttgcacccggaccacttcaacgtctaccgctgaccggggcgtgtcagcccgctgccgctttgcgagcggctgcacctaaacgggtgcgacggggtatcttgtgtaacaagtgttagataactaatacaagtagatgtagcacatttgctcaaatgtaggaatattatctacaaaaataagattggagctgtcggatccccaagcggtatccgaagaaagagtgctgcatgacggtagttgcatctgccccggctctgcgccttgccggcggtttacgttagcgtcgcgatggacttcgagcggaaacgctctgactcgtgttgcccctcagcgtcgccggtctctcggtcggtctccgctgggaagggcgagctggcgcggcgatgataactggagctgcaatggctagccactgggcgccatttaacgctgcaacttcaacgtccccatagacacgtttaacacagccgccagaccgctgaaacgcggggtaagtgctgcttgggcgcggtttcatctggtctgcgagcgctcggcttcgatgcttgacgggcgcgcgtcatgatggctacatgcgcttcaggcagggcaacgcttggtcatgagaacgagcgctaacttccacgaaagagcctgccggtgttggcgctgctgctgctgctgacgttgaagctccaagcagctcggagtaagcattacgccgcgtgggatcgcaaggtctgatcgaccaacctcaacatgcccgtcgtcctcggacagcggcgtcgccaatcgcgctggccttggttggctcctacgttactgccctgcagctttacgactttgggcgccttccccctagcgcctcgcgtttcagatcctgcgacctgcgatcaccaaggccctccttggcgtttcgcttcagcttattcctcagcttgtgcgtcagtgccagaacgcttgcttgccaaaggagtttcgcgcgaaactctcgctgcgtgtcggacgcctggagtcggccgctgccattgtatccttgagtctcttaaccccatgcaagcggagtgcgttgggctcggtcaggccagcgttgctcttgctggaaccagatcgcttgaggctccgggctacagctcgtgcgtcgacggcacatttcggcccgagcgagaccaacaccgcaaagcgctcaacgtttaagcgctcgaacggactgcgagacaaaagggcagacttttggctcgcagatcctgggacagctcgcggaccattcaaaagcgccgttgcaacctgccagcggcggcggttgcagcgcgcccaagcaacgaaccgcaacccatgcagaaaagcgctgccgagcctcctgcgagtgcgcagacgcgtaaaagctcttgcactgctcactcacgcgctgcgtgcgcttcagcttataatttaaaccgtgtcgcttcatgatctcggacagtgtctccagcttgccaaacactgccaatatcaccggacagtgttggtatccgctgccgcttttccgccaatgatacgccgactgtcttcacagtttccgccaatagcgcgccgtatacctaggcagtctcttttccatagcagagcgggggtcacacacgtggcgaactgggctgctcgcttcctgcgccgcgcttcgacgtccctgtgtacagctcgtgacgcgcggatgctccatctttttcgccactctgctgcgctgctcttcgcagtcgcgatcgcgacctccgcggcctctccagccccgccacgagccaagaaccagcaagaacaaggcgtcacactcgacgacgcgacgaatcctgctccagctccgtccacagaccgcgtcagtgcgcagaaagtagcgtcctacgacgtccacgcggatggctctgtgtccaccaagcggcagcctcagagcgtctctgtaggcggcaggacgcaggtccggagggacgagaacggacgctggcatatcgtccacctcgaggacgacgaagcgtccaccaccagccacgcgaagcctcaaaagcaagctcaagatgtccacattgtggaagaggacggcgcctacgaggactgggagacggagacggacagcgcgtcgctgccgatgctagaggcctccgaggcgttcctgacgctggaagatcgcatcgcagaggagggatacacgcccgagctggtggacgagttggtgcgggtcggagacactcagtcggccgccaaccaagacccagagacggcggacgactgggcctttgcagtgaccaagctgtcgtacatgcagctcttcgagcccaacgccgagtcggcggaggaacagcctttcgttgatgcaatccacaacttaaacgttgcagcggacgccggtgtgcagtcagcactgggcgtgctggccatgatggacttgattggggtagcggacccggaggagctggaggatccgagcattgctccgctgacgcagcaggagcgacaagcccgtggagaccgcgcgctcacgagcttggctgatgccaatgattttttggcgacgctagccgtggcgtacggaactctgtccggcaggcttccgatgacaaagaagaacaggagagcaggggcgaaggctgactcggatgcagtttgtgaagcagctctcccgttattccacaagtgtgcggaggaaaacgtgcacattattgtcgatgaaggtggagagcgtccggttgatgtcgtgcggctctcggatgagctgctgttgcccagcggattcttggacgattacggctttgatggagctggcgcattacatgacgagaacgcggcgttgcacgagctggaatactaccgtgccattgcgaacaaccccatggacgaacagtatccgcgagcgatgtatcgacttggagagatctacttcttcggcgacccggcagctcatgtagcgcctaaccacgcacttgcagctcagtactttcgccaggcagcagaagctggtgacgcgctggcacaagccaactacgccatgctgctcgcgaacggaatgggcgtggaccgagatatccctcaagcccttgttttctttcaccgcgcagctcggcagaatgaggcgtttgccttccatggcctgggcgtgatgtatttcacgggcaacggcgtgcctcagaacgtgacgcttgctctggaatactttgagaaagcgattgctcggggatacgctgaatcgcactcattcttgggctcggcatacctgcatggagacggtggcgttccgattgatcacgagctggccttctcgcatttccaggcggctgtggacggcacggacggccagtcgagtcaggcgctgttcaacttgggcgtcatgcatttccagggtattggcacgccacgttcgtgcagtaccgccatgccgctgttccgctccgtcgcgttgcatcctgatcttttatcaggcattccgttttcgctggtcaaggcatacgagtgctacaagaagggcgactatctgcgcgcctatctgcactaccggctagttgcggagtttggagatgaagacgcgcagtgcaatgctgcctttttgttggagcaccacggcgagagtatcctcaagtggcgctggcttggtcttgcaaaatcggctggagactccagcaatccgcctctgcatgaagctttcgagttgtactcgcaggcagcagcgctaaacgactcggaggctgttcgcaagactggcgcgtgcttccatgagccttgggacggtgtgtgtcaaagcaaccacacccgcgcccttgagcgctaccaattcgctgcgcaactaggcgacgcgcaggctggctacaactgtggcttgatgctgcttattggcgatggcgtcccccgggacctagcagcggctcgagactactacgccgagtgcagtgacgctgtgttcccagccaacgtgccttgtgcgctcgcgcttgtggggcttgacgttctgcaggctgttgaagcggtagtccagcgcgtctgggcatcgtcagactaggctttgatagagcaacgataagttattggcaagcaatctgtctattcagctcgtttcccacggcgtcgtgtcaacataatacatggggctccgcggtttctctgatctactacacggtgtcgtaagccttcccatcgttgtcccacgagtgttttctcttcttctgcttaaagccagcggcgatagaagcagagcgcatcgctccacgcagcttgcgcacctgccaccacttgcggagctcgtcgaagatgagcacgctcgaggcaatgcagcagacgtacatcaagtcgcccagcgtcagagcctcggtctggaaggtggcctgcagcggcgggaagtagatgacgagcaactggcccaacagcgaggcgccgacggcgtacacgaagaccgtgttggacagaatgccgatctcgaagatggacttgtcatcggaccggcacgagagcgcgttgaacatatcgaacatgacgaacgtcgtgaagctcaaggtgcggtcgcgcttgctaatggagccgtctgcactcagctccacccagaacacgtagagcgtaccgcacacgatgaagcaggccgacgtaagtacgcggcgaatcatcgtgcgcgtgataatgttggcatcctttgagcgcgggccctccttcatcacatcatggtcgacaggctccacaccaagactctgcgctgggggtccgtccatgatgatgttgatccacagaatctgcatggcattcaacggagacggcaggttgaatagtgtcgagaacgcaatcaagcacagcgccgagatgctcgtgctgagttggaaacgcaggaagtgcttgatgttgtggtagatggacttgccctcctccatggcgcacagaatggtgctgaagttgtcgtccaggagaatcatgtcagccgcctccttcgacacatcagtgccgtttgtgcccatggcgatgccgatatctgccgccttcagagcaggcgcatcattcacaccatcgcccgtcatggcgaccatcaaacccgcctcctggaaagctcggacgatcttcaacttgtgatgcggggacgtacggtaaaacacgcacgtcttcaagatgcgctgctccaactccaccatatccatgatctccaactcctgaccagaaatcacgagctcgtccacggccttggctctctcatcatcgcagtcaacactgctaaagctgtcgttggaaatgattcccaccttactggcaatcgcaatggccgtctccttcgaatcacccgtcagcatgattgtcttgaccccactcagcgacagctccaagaccgacttctcgacctcggcgcgaggagggtccgaaatgcccacaagcccagcgaacaccatgccacggtccgagtgctcgccgtacgacagagccaacacacgtagaccgcgtgcagccatttgctgggacgccacgaagatgcgttcgcgatcgcccggcgtcatgtccttctcgcgcccacagttgtcctcgatcttgtcgcagcgcgacaagatagcttccgccatgcccttcaagtaccaacgagagggaccaccagtcggcggctcgcagcacacagccatccacttcttctccgagctgaaggggacttcactgacacggcggaactgctggatggccgacggagtaatccccaccttttgcgcgcagagcagcacggcgccctccgtagcctgacccagcacttctcggtccacgatagtcgcgttgttgcacagagcgccagacaggaggcagtggtaaacgtgcgggtgggactcctccgtgacgggctcgccccgcatcgtgacagctgagcgcgcactcttcttggccatgtcaaattcggaagtctgcgatggcgaccgctctcgttcgccgactccattcacctcagcggtcacgctctcaaacggaacgaaaatctcgatcacctccatcttgttggtcgtaatcgtgcccgtcttgtccacgcagaccacattgatgcagcccaaggcctcgacggccggcagcttcttcacgatggcgtgtcgcttcgccatcttcatgacgccaaaggccagcgtgacagtcacgcagataggcagcccctcggggatcgcagccactgccagcgagacgccaatctgcagcatcgtgagcatgcccttgtgctgaatcacgccaatcaccacgatcaaggcgatcacagagagcgagaacatgctcaaatgcttgcccagcgtgtccatgctgttctgcagcggcgtcttgcgctcctccaccttgtgcaccacgtcaaagacatgtccaaactcggtgcgcgatcccgttccgatgaccaccgctcggccgcggcccgcgcgcaccaacgtgcccatgtaaatgatgttcttgcggtcagcgattgggtgcaggtggctgtccgctatggctcctgtgatcttgggcacgggcgcgttctcgcccgtcagattcgactcgtcgacctccagatccacggcctcgataagcctcgcgtctgcgggcactctgtctccaacgtccactatgacaatgtctcctggtaccagctccttggccagcatgtccacaaccgcgccgtctctcagcgccttgcagcgcggcggcacgagctccttcagcgcctccagcgtcttctcggagcgatattcctgcacgaaggccaccgtgaccacgatggtgatggccaccgcgatggagatggcgtcgtctgtgtggcccatggccacgctcaccacgcccgaggccatgagcagcatgatgagcgggtccttgaactggcccgcgaacttgacgaggatggactcctcctcctcgcccgccagctcgttcaggccgcactcgcgctgccgctcgcgcaccgacagctccgagagcccgtagttggcgtccacgcgcagctcgcgcgtcacctcctcgtgcgcgcgcgacgacgcctggctcagcacgccgccgtccatgctcagcagcgtgagcgacagcccctggccgttgctcagcgacagcgagggcaagcgctgcgtcttgagcgcgggggcggggcccgagacgccgctctcactcactgcgatctccacgtcgctggagtccgtcgccatggcgagagaatggtcgcgctagctggaagggcggatctggctggatcttgggttcggaggccgcgttctcgggatgtagagcgcgcctggagaccgcgcgaccgccgacacgtagaggaagcgcggggctgtgtgcgtactatcgaagcacccggagaacctccgcgcgaagagctccagatgaaggcggagggggccgacgggcgattcctccacgatcgatgttcccaaaatggctcgagtcagtgtcggttgcactggactgtgtccattgacggtgggagtagcaaattctattggatttctattgacagacactgcatctggacactgcgaatatcaatagacggtgcagtacgcgtacggcactgcgattcgtggaaaaggatgtggatttgtaccaatgaacacgctgtaaagtgtagccataaaggagacgtgacacttcaaccaggtcaagttgaggcacatggcgatcttctcaccagagaaggggtttccgaattgagttggcagcaagcgcggcttggaaatagacgtcgccgcacatcgcatgcggctcggagctttctcttccatgctcccatgctcgtcagttggctatttgcaggtgggcaggtgataacacgagcatggagaacgctcagcgcgtcgtggcggacattgtggcgagatgcaggtaccgaggtgtcgaggtttccgagacgctggcggcgttcacagcgcgcctcgtagtgcatcgcagtcggcgtcaccttgtgctggagcagcccatgtcgcctgaggacgagctgtacctgaccgagcagtgcgagcaggccctgctgagagacgacgaccctgcgatggagaccgtcaagatgcagctggagttcgacttcacgcacgcgaacctcgaggaggagctgcgtctacgccgcgaacgcaaggagcaggcggtcgccaagctgcagcgcacgatctcctcgctggtaccggaaaaggccaccgacttcgagacgctctcggcgctgtacaagcacattttcactctgctcatgctggacgctgacggtcttggcagaaacaacagcgacgacgaaggcgacaacaacaatgggaagcaccacagcaacaactcgagtaagcagcaggcggagcgtcgagccatggagaaggaggtagcggcggctctggagagcgtgttcccgcgcatcggcttgaagtccttcgctacgatgtctcctgacgacaagcgcttccagctggacgagctcatgcgcatcgtggagggcatccgcctgttcaacaaggagctggggaagggtggcgcaggcatcccagcgagcgggcgggatatccaggataacgtcgccgctctcgcaaagcttgtgcgcgacgaggtgcgtgaagcaaacgagatctgcactcagtacaccgaagtcctgctgcatgtgcaccaccaacttggagagagtgccgattcgacggagccacccccgaaagccgacgaagtcgcacgatggcaagacgaactgagcaaccggcgccagttcctgtcgtatctgcagagccttgaggaggacattgcgttctcgcacgagaaggttggcacgcggctgcagatgtttcaggccgacatgagcgcgctgcagaatcttgtgggggcgcgcacgtcgctgccgaagtcccatgtgtatccgctgttcgaggcagtgtcgcgttcgtgggcggagctgcaccaagagcacgagctgcttcaggctcgagcccgcgcgctgcggtcactactgcgtttcaagtcgaccttcacaagaacgctctccccggagtcgcccatagtgcgtcaagctcggcgtgggggctccatcccgactgaagacctcttctcgcacgtcgagacgttccccgccgagaggcagctcactggagacggcaagacaagaagctttggcttggcaggcgacgaccttgacggcgacgaggacgacagcaatcccaacgaggaagaaggctcgggcttccccattcgaatgcccgtagagtcgacgcccgagttcatgcagctaccactcgagtaccagggattctgtccatggaccgtggtggagcgtggaggactgttgctgccgggcgatccgtcgctgggcgtcgtgcagtaccgcaatgcttaccacgtcttcgtcaatgagcgcgcgcttggtgaattcatgatccatccgcgtcgatacgtgcagggggtcctccaccgcgcagctcgacaacccgcactcatctacttgctgcgcctgcaggaatcgtttccgaacatcacgctgtcctcgctgctgaaaatgtgccaccgtttccgcgttgaaggccctcgaggcgtgcatccactgctggctccgccgccgtcgcaaaaagtcgacgccagcaccgcgacgcccacgcacttcatcgagaagcgcatcgactacaactacgactggaacgagtggaatctccgtcgcaaagccatcaagatcgccaacctccgacactgccgcaccgtcggcgcccagaccgccctcagcagcttccgacgggaagtcgacacccaggtctacctgccggctgaagtcggctgccagacggccaagacgcagggcaccaatcctccccgcgtcaccaccttcttcacgggtctgcgcaaaggccacgtctacaccatcgacgacgccaaacgcgccgaagccaaggaggcgaaagacgccgcagcgggatccgagtacaagaagagccgccgatccagacataactacgaagacgacgcaaaagagagcaaagcgagcgaggacgacgacaaccaaccggtcctggtctcctacacatttgatttgtcatagtaaaaattggtttcatctaaaaaattcgagccataaaaaattaggcgactttgtgagagtaaggctcaagctgcaagtgatgcgagggaggggatgaacagggaaacgaaccataccacctgctccggacgataggctgggctcttgaagcgtggtcgattaagttacacgctgaagatgaagtccgtaaacttctccgtgtcgaccgacttgccgtccgcctcgaggagctccggagcgtgcttcttgataaactcgacctgagacgcgtcgaagcgttcctcgatctcctccatcgtcaactcctcgccagtgagaatgtccagtgcctcgtgcacgtcgtccttcgtggaaccgctctgcagctgctccgtgcagaaggtggcgaactggtcgaacgtgatctcgtcgttgtcatcctcgtcgatcttgtcgaagtagtcgtggcagtcatcctcgctcaggctcagaccgagacccttgcacgccatgatgaactcgtcgcgagcaaggacaccgtcgttgtcgaggtcgaagtggtcaaagacctccttgatctccttcgcctgctcaggggtaaggctgcccacctcgctaagtgcgagctccttctcgagggacttcaccttgtcgcgcacagcaatctccagcgacgtaaactgggcacgcagaccgtggatcgtgtccgttgtgaacgggttcgtgtgcacctgcaggcgctccagctcctcgttaatgcgctcaagcttctccatgtcctcggtgagcggggcaatgatctccgcagccttggccttggcctcctcaacctgcttagccttggtctcctcaacttcagcggccgcatccttagacttgtcgccctcctcactctccggggcggtctcgctttcagcggcaggcttggcaacctcagcaaccacagacgtctcaacacccgtgatctcagggtcttcgggcttaccctcaacttcttcctccagcacaacgccagtgttggcgcggaacaacctgtaacgaagcttcaccatcgagttgaactggtccttcagcgaaccctccacgacattgatcgactgcgtactctgtgcgcaacgctccttaatgcgagcggacagcgtcgcgaattcacggcagacctcgtcacgcttctccacgttagcgagctcctcctcgtagtagccacgcttttcagccagcgagtcgagcagcttctgcacacgagcgttggtcttctcaattagcgccacgtcgctggcacgaccagcgtccgccagaacctgcttcttctcaataagcttctcattctcgctcacgacggcgttctggactttagggaccagcaccgtgtcgaacttgtgcttggcagcaaccacgccggccttggacacgtcctggagcttcgtggcagcgtccacctcctcgtccatctcttcaatgacgtacttgaggttacgcatcagcgccttggcgtccttggcaaccgcgtccacgctctgctgcaggcgcagactctcctcgagtctcgccttcacgccttccaccttgtcctcagccatggtgacgaaggacctcatggcctccagacgctccagcgtggccttggtctccttgtggtcctcggacaggccatcggcctcgtcaacgacagtagccagcaactgcttgtagcggggcagctcgatgtcctgcaggaacgccacactctcgagcttctcctccgcgtcggccgtggacgtgacggccaggtcctcggcgaacagagcaagagcctccttctccttcgcccaggcctcgaccttctccaggtccttcaccaccttcgtcaggaagatctccgtcttctggtagctgtccaagttctgacgcagcttcagctcaaaggcagtttcgagttcgtccagcttggccttgagcgcctgtaacttctcgatcggcgggtccaggttcggcacagcgcggccgttgttcttgcaactggcgatccagcggccagcgcagccttcaaccgccacgaactgcgcctcgcgcggcggcttctcattcttcttgtactccaagtggcgagccagcgcctccttgatgtccgggatgtggcgcggctggctcagcgtctggaaacgctccgtctgctgcgtgagccactcgaggagacccgacgcgttctggttgaactcggcggccagctcctggtggcgctgcgcgatattgagcgccttggagatggtcgtcactgccttcttcttctgcacgcccgaggcgaactccttgaacagcagcgacacgtacgtggtgatactcttctcgtctggcttgagctgtccggccacgctctcgacctcgagcagctgcgggatgcggaacttctcgcgcgcgatgtcgaaggcgagcttgacgttggcctgcgcgtccttggggttgagcgagttaaagtcgatgagtgtcggcgcgtagcggtggatgagcgcgcagaaggccatgccgtccgcccagctgctcgagaagttcttgacgtccaccgtcgggtagtcggccagcgagcggttgacccagagcagcaggccgtccttgcctgagacgccctcgacgtcgatctcggccacctggaaggccttgatgagcgtccacatgaggccgagcaccagcttgttgttgccgtccaggatgtcggacgagccgatgttggtcacgttgacgttcttcttctgcatgaaggcgaaggcgaagttgaggttctccatcttctggatgcgcatgcgcggcttcttgttgaatttctgccacggggccgcaacaaatagacaaaagagagagaggttagtcctcactcaggccaaccccctctagccgctgtacgtacgcggcacactttctcgcggcagatgatctgcagcagcgagatgaggcggatgccgtccttcaggtcctcgtacaggtcatcgatggtcatgcgcttgcgcgacaggtacgtgttggcccactacagcaacggcatcaaacaggtaggtaggtcagttaggtcgggtatctttcccccatctggggggcgtatctttatctctatctgcggctggcgacgcactcgagtgaaggtgctcttctgcacgtcgacccactcctcgttgtagccggccatgctgtcggtggcgctgctgatgctgattcgaggcggtagtggggaggggggggcggcctcgctctcgggctcctggtgtgtgtgttcttcttctgcgtctgttgctgcgcgcttggggggggccggcaacactagcactggcgccacgcctcgatgggaccctgcgcgcggtcggtcggttgctgctgcgttcagccgaggcggttcctcctgctggggcgcctgtcttctcctggcctgcttatcccaaaatgctcggagactcgagatcgagacttcggtctggcactcgcgcgggtcgaattccatgcactctacacggtcagattgcgtgtggggaagggctcacccgggtcgagcggcccgcgggcacaaacccacgctcgccgcgcgcagaccgggcgcgatgacggcaaagcttccgcgagagaatccagccttcggctttgacggcaacttggctcagccttcctgcctgttccgggacaacgcgcccgctttggatacgtgtgccttcatgcacttggaggcgtcgcagcgttctggttctaacttctagttctctctcggctgcgtgctcatcgtccgcccctggaggccggcgccgcccgttttgtcttgctatcgcgatgcgacaccgcggcgcacgccagagcaagcgctttttgcgccgggtccggctccggcctgccaggcaccggcgcgcgaccgagcggtgtcgacttttgcggcgccacagccgctgccggagctgtcgcggcagcccgagtgcaaagcctcttggattagtcgagcttggctgcgagcgtcccggtctcgtcaatccgacgacaacttcaactggcattgcacgtcgactttagctgagcctgtcgacttgtacttccccactatcaatgtacgcgaccacgctgctggttgcctgatctgaagactgtttgctgctggttgcctgcctcctatgcggctcctgtgcggctccggggcggggaggacgaccgtctcgatgctcgacgctcgccattgctgcgtgtcgacttaactgttaagccgacacatggctgccgcgtcattccaacattactccaacattacctacacgcatgtacatgtacatgtatgcaatgagctccgcgcgtacagtgcttgcttgctgcggcgtgttgtcgacgtatttgatttgggttttcgtggctggagcttcggcggagggtcttagtcgccggaaaaactgccggcaacgccacgacggacatgtcgtcgccgacgttgaagtggcgagtttgacgcggcagccacgcggtgccaatacgtttcgggcaaagcgcatgctgagggcggacaaacgccgctgccggctttccggtcacaaccgggcaccgccttcaacttcgtaacatcgcaaccacagaagtgttcgtcgccgtcgctgcgaacaacgtgtgcgctgtgtacacacaccccgagctcaaaaaatgcgtgaacagcattgtgataggcatcgctctgtctgccttacaagcacgcggtcggaatgaactgctcgtggaatcgctcgagagcggttgggggtcttttgaagtacaagtacacacagtatatgcaacaacaccgttcacctgcctcgagaagcttgtgaagagcagttcaattgtgggaaatggctaggtcttagctaagtatcaaacccccaacaatctcgtccaccgctccaagcttggtggcaaaggttttgacctggatccagagaacccttacagtaggcgtgctaactgtacaggattggcacttgtctacgtcttctcctcttttcttttttttatttgggggggtacttaccgtctacttaagtatcccccgccatggcagcagtgccgaaccggtacatacttacttccaattcagcagaacatcaggcaattcgaagtcaagtgtgtcggtattattcagcgggagtgcgtgatgaacaagaattcgcggttccatcgccaggccctgttcatctaagctcctcacgccgctatgcaagttaactcaaatgaatttcggatcaatgttcgcatgagcaccccgttgaggactgttgatagcagcacacaacgacagaaagcatgtagtaatataattttgaattgctgtcatcaaacatgaaacaacatgaaaaagtcttgttcactgtcccgacgctttctcacgcgaggatgtgcaccatcgttaggggctgcctcggacttgcctcctgcttcacctccaacgctcggacaagcccgacttcgtccaccggggcccacattttcctgccggtgtcgagctggatggcgtaggggtttccctgatcccagagctgcacgatggtgcccgcctggaagccctcgtcgccggtgttcgccatgacccggtccccaacacggaagcgcaggtccttggcggctcgacaggccaggaacccttccgtgagcgcctcgcggtcgaggttcttgccgatgaagacgaaccgcgtctcgcgagtctcgcccggggcccaattgtcggcgaaccggccattgaagagcttgtgcacgccctggaagacgtacttgcggtcgataccggccacgttcaccacgcccttgtagcgcagcaggtcgtcaccctcagtctcgagcaggtcgtcgatccactcttccagcagcgccaccaggatcggatccgagagactgagccccaccgacgataccagcgagtgtttgtgtcggtgtcctccgccgtggcggtgctcgccttcgtgcttggcttcgtgatcatgaccccccttcttgtcatcctggtggtggtgctcgtgttcgtgggagtggctgtccttctcggtcttgaggaaatccggttgccgcttgagaatggagtcgaggtcgaatgtctggacattgagcagcagtgcggggtctacgcggcagtgctggcactcagtgatcgacacggcgctgttgatgtcgcggatgcgggtgtggacttcctggagctcagcggagcttaccaggtcagtcttattaagcaggactcggtcggcgaacgcgatttgctcttggcactcgtgctcgacgccggctcccgggcgcaagtgctgcagaatgtgcttggcgtcaacaacagtgatgatcccgtccagttcgcacgtagccgccaccaagggctcggcgaagaacgtctgaacaacgggaccagggtcggccatgccggtggtttcgatgatgataccgtcgagctggttccgatccccgttgcgcttgaggatctgcgcgatgagccggacgaggtcgccccgcacggagcagcagatgcagccgttgttcatggtcagcacctcctcgcccatgttaaacttgcggctcctggagtcgcctccgccgatgtcctccgggctggcgacctggcggatgagctggtcgtccacgcccacttcgccgaattcgttctcgatgatcgcgaacttcttgccgtggttttccgtgagcaagtggttcagcagagtcgttttgccgcttccgaggaagcccatcaggatcgtcacgggcagcttcgaaggagtcagggagcgcttggtcatcgcgagttgaaggggtggaggtacctcgtaagggggagtattggtttgagaaccgatggaaattgaaaagtgaaaagcacgacaacaaccgccaaagtgggcactaccgttcgtcgtctacggatccgacattgccttgggcttgtggtatcaggtggatctgctgtaagtcgccgtcggagaagggcttgtggcgcatgcgttggcgcttcgagatgaagaccgcttccaggcaccgaagtgattaacgcaaccttaattgaaacataaaaaatcccataagtttgttaaggttgcttgagcaactttgtaaattacgatacattcggctactgagtagtttaccgcaaactttctatttgaggtaagatataaattgtcaaggtagtccaacgcggccggaagctcgagtgaaaggtgctccatttcgaaagatccaacgtgggaggcaagctgaagaacaagcaagcaccatgctacgtcccgcccgacgacgtgtaagtaagtttctttgccatagcttcgggtgcgcgtatatctaacacttgtgtggctctggacaatagctacgtcaaacggccaagcagtggacgaagctgaacgacagccagcgactgggcgattggaaggcgctgcgaggaggactgcggcgaaaactgtgacagcgaagcacacctgaaggcagctatggtacgttgcactgtgcagagaaaattgtagggtgcgtgctttcgtaacccaacgtatgatgcctgtgcgtgttcgagcagacgtgaagccgcggtcaaggctgcgttccggcgaatcgagatctcagccaagcgtaaatggaaagaagcgaaagctagggcataatagatggtgtgggtattgcttaaaacagactactatgctagagggaatcggtttggtcgggaatttcttagcagctaccatttaggcaggagaaaccagtgatatgaacgacgacgacctttgtaggtataggctgcacttgtaaatactcgatgtcttggcgtgacgcacgtgaagtctgtcggctcatggccccaagctcgaagctgttcggcttcgcttgcacagcgctaacaactggcacgcttgcgtcaggaaaaggtgctgctcaagttgcgagaacttgacaccgggcatcgcctgcatctctccttctggcagcacttgcggtgcttttaactcactacttaattgcttgatgtacatgtattcgtgtcgtgtggaagctgaaccacggcagacagcttcctggcggtgatagtcgcgcttaacgcggtgtagctccgtcgtcttcgctaggatacgtgttgcaacatgttttgagaagtcaccagcccgtcaaccttcgatctcaaaattgtcgccgctattgtcattttctcctcgataaattaccggttgctgaagcaacctgtaattttaaggttgccgagccgtttttaaggttgtggaagcctctttaagggtgctgtagcgggtgtcgttttgtcgtaacaaagttgctttacggactgcctccaggtaccacatacactaccgtacatcggctctccctgaacggtaccggtaccaccagaacccgtcgtcggcgaatcaacgtttgtaaattttgtatttggccgacggcgctgctagtctttggtcgatggtgccggttgtacctgcattcgactgagccacaaaaccacttttccgacgacgaagcgcatgttccgccacaaaacaacttcaagctgcttcttctgttggcccgtttggtactgtactgcaccgacttgttgcctaggtatttcgccctcatagcaacgatccaggttcagcttttatcgtatcagcctctcttggtcgggatgacggaaaataattaatacctgttgttccagcactgtcgagctgttggtaccgtacagctcctattgacctgtcaagtaccctggtcagctgttgttttccaacagatactacgtagtattttagattaaatgccagttgcgagctcaagctgcgattcgcgcgcatactcgctcttggaaaattcaaaaccgcctcatcaaaagcacttcagtcataggtacatcggctacatagccagtaacttgcaaatggactgctcttttccgctgaagaatcaatggagaacagaagtaaaaccaaagcgctgtaggttcatgtagcagaaggtagtgagcgattgcaagggcacgtagcagaagaaaacctggtactgtactcgcaaattaggccgcgcggaatttcgagaggcggaaaccattgccgagcattcctgcgaatgggcctgttcccgcaactcggagtaagatttcctattgctggggtctagggagatccacagtccacactcatctcaggagaaatccatgaaaaaagtagcaggttaaacagaaaccaacagctgaatagggctcatgacaggcgaacaggggctgtaggtggggaacagccgaacagtgctaaagtaacagctcataaatatcaccccgggatgacgcacctcagcagcgctgatgccattcgcgtcggcgtagtcgtttgtggcaaacgagaccgagtagcccacgactcgtgggccacgagcgacagaatgcaagcaagctgcccgccagcactcatttgactcgccgcgaatgcgctccctattgaatatttcgcaagaaacagcacaaagttggtgaattgtacccgttgcgggttgaaaggtaccgaatggaggcgtacggtcatcgtagagcttggtggcggtggcgttgagtctgttcgtcttggtgcagtacgtcttgccgaggttctctttgaggcagtccgtgatcgaaagtcgcttcgactccggtgctagcgacattccgacggggatgtacccgcataaaccacaaacgcaaccaagaagctcgacaagaagacgagctggatcaccggcgtcttctttcgcctgtggaatctctgggctacgttgggggtatcaacgcccgcacgctggtctctgacagccgtatatagcttgcagctcaggagcgtcgatcagcgggcaaaaccagcgacagataagcatactgttcatattagagcatgaccaaggcgatgccttacattgatgaagatagcgatcgtttcgaagcagaagaaccaaagagtaccagctacatggacgatagggtaattcgcagtgtcgaagaaggcctagcgagcaagagtgttcgtcacatttaatgcgatccattccaggatgccaaggcgactaagagaacgtaccagtactggtaggccaaaacttgctactatccccgctagggcgcaaatgaacgcgattgctcgaaggtgcgcggcgtcttcaggtagcgccgatacgtgataacggtaattgaatgcccatgtcggcacaagaagcactgcaacgagtgtgaggcctgcacagaatacttggtaggctggagggtctgaaaggaaaaatagaggggccccaagaaacattttaggaaggtgcggcaaattaactatcaaagcaatcttgccccatttctgagagaaatggccacgctaacccgctgacccaaatgtgattcaccttgacaatcacaacgcaagcgatgacggtggcgaggatgcagaacgaagcgccaagagggcatgcgatgcgaagcacgcgcttcagtgcagacccatgcatcactgttttgctcgtgaagggagttgacacgacggatcgaggcgcgatacttcacttcaactgaccttactgacagagctgccatcagctggtaggttggttgtgtctgcgtcggactcgcttggattgacgtgtgaatactggctctgctgtggccgacagtggtaatgatatatgtaacacttcggtcagcccattcgaagtcggtaaatgccagagcgtaccattgatgtgttcctaatattcaccacactgcacgacgaccaatttactattgcaacaaactactgcagcacggcgatcttggcctccggagtgaaggtctggccctccgagtcgtcgtagtcgttcgtgatgaaggacgtcgagtaccccacgagcgtcaggatgcaggcgagctgggcagcagcacgcatctggctcgtgccgaaggttttctctgtcagaataagagcatgaaaacggagatcgtgttagcccaaaccaaacagtaatacagccgccttgaacgacgaaatgcccgcgtaccgtcgtcatagagcgtggtgtgcgtcgagttgaggcgcatctccacctcgcagtaggtctctccaaggtccaggtcgatgcagtcgtcaatggagagacgctgcgatggcggggccaccgacgttccgatgggcatgtagataaggaacgccacgaagaacagcgcgaagaagaagagctggatcgtcagcgttttcttcctccgctgcatcttggcgccgacggtcgagcatgcgttctccaggtccgtttgcaggccggtcagcatcttgtagagcttgtagctcacgatggtctgttcaaacacaagaggggaccgtgagaattggtctgatagaggtactggggtgtttgagccacgtacgttcaggagaacagcaatggtctcaatgtagaagaaccactcggcaccggcagcgtggagcttggcgtgcttggacgtgtcgaagaaagcctggcaggaggagcgtcatcgcggtcagtgaacaattctctcgctggcctacacgtctgaagtctgcgtaccaggacgggaagccccgggttggccagcacgcccgcgacgaagctgacgaaggagatggcgcggaaggccgtggcgtcctccggcagcgccgacacgtggtagcgccagttgaacgtccacgtgaacacgagcagcgtggcgaccagcgtgaggcccgtgcagaacacgtagtaggccgggtagtctgtccatagccagcaaacactgataattagggccgactgccacaaagaagaaggagaagaaaagaagaagaagatgtagacgcacctcgccccatgtcggagaggaagggccacgagagtccgctgacccaaatgtggttcaccttgacgatgatgacgcagctcacgagcgtcacgaggacgctgagcgaggcgcccagcggacacgccgtgcgcatgaaacggaggagctgggcggagtccattggcgctgctagctcgacgcagagggaggcgaatggcaactggtacaggcggaggagaccgtggccgacagcattgacaggttgcgctggacggcagttgaaccgaatacctccggggcttttgggcggaccgattatggacatcggtggacagaaccgggctgccatgaacgcgaacgagctttgcactgcccaacatgtgagctcggcgaaggcaagcggcagcgagcgccaaggcggcggcgatggcgatggcttcgctcctgcaggacagcagcgtgtgcaaacgcattgctatcgatgcaacggacgcgttggcccatgcaaatggttgaggcgggctccgctgcgtcggattccaggtgccaaatatgcggagtgcaagtatcagttcttgaggcgtgtgtttgtacgggaactctattcctgctgtccgactgactcgcacctagcttcgaacaacgacgtgagatcccagagtctgctggcagtcgaggtgagcgtcaaggcgctcgttgtgcggtaggtcaggtgatgtgagcccgagcgatgatacatgtatcggaggtatgtacatggctcacttcgatgtgagctcagctcaggatcccaccgaagtgagctgagcgtgtctacgggcaaatgtatccgatggatggtatttctttcatccacgactcgctcgtccaagcgcatctgggaactgaacgtcgccatcgactcaacgaagtagggaagatacggtgccggtgcttgcgctgtatccgcagcgtccagcccggcgtcatggcttcacacctggatgcatcgctgtcgggcttgatacggtagtctctaaattcatgcaatctgcagagtgaaagtgagtagtgggtcatggaatattacgccggcagttttttttccttaccgtaatttaccaccgagaacattcctgaaaccttctttcgggacagcagcgatttcaacgacgacccctctcgaccacttgagagcgagagccacgtcttttcgatatgagggcagatctaatagacgttgatttgacgacgcccactttatagcgagagccacgtcttttggatcttggggcgtttcgggaccgctcgttcaaactacattgataaagccaatagaacattacgcccgcagattttactagtagttcggaccagcgcgacgtggcgtctcatcattggttgaaaatctatgtcacacaccttcatgttcgcttaagtacgccagaaattctacatccttctccctcattccagaatctgccggctcgaggaaagatggtgaagctcttctgtgcgatcgttggcgtggcgggcagtgcgttcgaggtggatatcgacgcgggtgcatcggtttccgcgttgaagaaggcgatcaaggcggagaagacgaacgacttcaaggacatcgacgcagacaagctgcagctcttcctggcgaagacggcggacggcgcgtggctagatggagctggcgcggcatctgtggcgctcgatgaacgtggatacccgcaaggcttcgggcagatggatcccaccctgtggatcaagaaccccaagcactttggcgataattttcaaccgggtgaaggacaagttcacgtgctggtgaaggtcccggagcaagaacacgcacaaactggattgtggcttgtcactggatccgttgacaacgcgttgatcacgaaaggaattcgctgcaaactgtactggatggcgacgttacgcattggatactacgatcctacgcgctgcatcggcaacaagaatgtcgcgttttggtatgaagacaagaaattgtgttttcatgttttattcgagacaagtacgtgcctctatatgctgtcgctgcatcgtaatactgcttcattgagggctaactctgtttcttttatagaagatgctgctttgctgttcgaaactgacttgaggactgggccacaaacgctgggctctccgttaactaaccaggttgttgagacgcgtgttgcaccagctaacgctgtgtctactgatctccagcgcgtcttctactgcgactacgttccagacgattcggaatctcctcaaaacacagtttcatcgatatcgttgactacaagcgtttcgaatctggactcatcgactgacgagtttcgttttcagcggattgaggacgcgaagttcttcctaccgtacggcaaggcagaaagctgccatttggtgtcgagaaagcaaagcagagaccacaaacgggaattcgccaagtacgatcgcgactcaaacaacaggcttgcgctttctcgcgaaatgcatggttggttcgacggtatgagcattgaggttcccatcgtcaacatgctacccggatctgttgaagagaatcaatccattggcaacagacgcaaggtactgtgtgagcgcgtagttctggtgtgtgtaagtttactgacatttgcgtgtaggtcgaggtcttcgtgaaggttctggatgctcagtgcacagatcgcgttttcagtcgtttgaaaggaggatcaaccacgacggacgatccgctcatgatgaagacgtttgttcacgtggaggatccagaaacattttgtttgtgcatgaggtggaagcacgacgataatgcggagcgttggagaagcttttgggatatgactcctgcggtcgattgaatggaataatgtggctcccgagttaaatacttcgaagtagtatttgatttcttgacatactttgatcctgataaatataaagttagtaatatacaaagatggcgtactctcctgagcaataccaagctagcaaggaacgaatcaaagcagcgcagaagcgctactaccagcgcacacgcgaagcccgtttatcttatcaaaaagacaacgatgacaaggacagagaccagattcgagctcgcaagcgtaaacccaaaaccgaacttattgatggtgaagtcgaacttaataatgaaaccgaacttaattaattaattaatttttttcctcggataaaaagtcgcctatgatataaagtcaatcctgatacaagacccaatattataaagtcgttttttcggagaataatatagccaccgatatatagcaatgttcgcatacgagcttgaaggtcttaagagattaaatattaacccaatccgatggggtagcagctaccgtattaaggtacgtggcaagacggggcgcatggtatacattagcaacatttcccaccccatcaaccaaaaattgatagcgaagcagtacaagatcagtctaggcaagctccaaaagaatgtggctgctgatttcaaggaagacagtaagtaccgattctaccaaggcaagaacatggagtcgcacctctacgagggaattcagcctgctgagttctacgacaagctcgagaacgtgctcgcaacccagaagtctgccttcaaggtcaacatcgctcttggatacaagcttgtcagcagaactgatgacagcgagactcgctacttccacccgaatattagcaacacgtctgtatttagcactcctgtagctatcaacagcaaggctgatattcgtaagaaggtgatctcggagattcgctccatggagttggctgacaagcttaactaccccagctccgggtacatggtgaaggggattactggcttcaaaatctatatctaccaacgcgaccatgctctgggtgatagcgaggctgtcattcctaaggtgattcgtgaataacaagcacgtcatcaacttccccaagacgaacaacaagtgtgtcttccactgcattgcttatcacaagcaggagggagccaagaaggatcctcgcagaatccaggctctggtgaaacaagccttcaagcagtactgttcgtacaaggagatcacctacactctgggtctgttccgcaatttcaagcctatcgacattctccaattcgatgagcttgaggagtgcttcaagctgaacatcaacgtcttcaacatggatgttgagacgggcaaggttgaatgcattcgctgctcggacaaggactatgattcgatcaacatcctgtcgcacgagaatcacgctctctacatcacgaacgttgatatgctccagcagaagtaccaatgctctacgtgtgagatggtgtttgttagctctgataagctacgcaaccacactaagaaccaatgcgaactcgtgaacaacgaatcgttcccagctcagccaaccatctaccaacccgctccgaacagcattcgttccatgctgactaaatactccatcaaggatgctgaccattacatcgatcacttcattgtctatgattttgaggctatcctcaagcctacgggtgtcaaaaacggagagaatactatcttcgcaaacgaacacattcctgtgtctgtttccgtggccgacagcttgactgaggaggtgcgatgctttgtcagcgatgacccgaaggagttgctcaaggatatgttccagtacatcaaggaagttgcggctaagattcagcagtacaacgtctcgaagtacgagtctttgctccgcaaaatcatcaacgtccatggtttgactgacgctgaggttcctggtctagacttgggtaagacgtacaagatggatgatgtcaatgcttgaattcagaacggggagtttgcttgtttcttcgatttccacagcaaactcacattcggtaagaagcgctcggattatggcaagctgaagcagtgcattggtcaggtaccagtattcggattcaactctggacgctacgacatcaaccttatcaaggcggacctgtttgcagtcatcggtactgacaacatcacatcagtcatcaagaaccctagctacatgtgcatcgccacgtcagacatgaaaatgcttgacattagcaactatggtccggcaggcaccagctatgcaaagtacttgtcgacatatctcggtgagtgcaagtgtgatgacaagattcgatgcgtctgtggcctaggaaaaggcatcttcccgtacgagtacattacttcatttgacttactcagtcagccggaagtccctcctaagtcggcgttcgacagtgctcttcgtagcactagcatcagcgatgaggactatgtgcgggtacagttcgtctgggaacactatggcatgaagtcaatcaaggatctactcatttggtacaacaacctcggtgtagtacccttcatcaaggccatcaaagcccagcgagaactattcaaacgtttcgaacttgatatgttcactgatggtgtgtcgctacctggtctctctgagaaagtcatgtatcagacgtgcttcaacaacctccagcaaccaagtaaggagcctgctgaagcatttgactttcccgctagtcgcttaagtggatataagacccaggatgctgatgccgatcgtgaattcaatatgacgctagaacacctcaacgacttgctagagcgacaaaagtacctgtgtgggctatgctacaagcaactcacagctgatactgcctcggctggccgaatcaataacaagctcggacacatcgatggtaatatcttgatcagctgtgtgggatgcaacgttgctcgcaagaacatgtcgctaaagggcttccgccacacgaagctacttgaattcaactcagacaggttggtgtacagtatcgatagagaggagaaggacatctacaccaagatgaaggcgaacattgctggtggtccttctatcatcttcaacagatacgcgaaacgcaacgataccaagattcgagggggtaggatctgcaaaaagatcatcggctacgatgctaatgctctgtatttgtgggctcttggtaatgagatgccatgtggacggttaactaccatcgaagcatgcacagggatcgtcgatgatattgtaaatgacaagatctctggcttcatcgagtgtgatatccgtacaccagagcacctcaaaccctacttcagtgaaatgatcccaaatttcaagaacacccttatagactgcagcgatcggagtgtcatcggtcagcacatgttcgagtacaacgaggagcgcaagcaaagccgagcaaagccggctcgcaaactcatcgggagctactttggtgagaagatcctcatttatgcaccgctactcaaatggtacatttctcatggtatggagatcaccaagacttacagcttcatcaaggctagctctcacaaggcatttgcaccattcatggaagccgtatcgagcgcgcgacgagagggtgatgaaaatgttaaatccatccgtaagatcattattgagaaggtatctgactctgatatggatgatttagtccaagagttgaaaaaaaccattacgaaccctaaatcatttgatgcgctcattatcgatagattcatgaatgaatcgacaaccaatcctaagattcatttggttctagacttgttgactaagctgaaaacgcttagtgagggtagcaataataaggctatgattgctgagatgatcaaactggttggtaatagtgcgtttggtcgatctggcatggacatgagcaagcacaaggaggtcaggtatgagtcggacgataaggcaatcaaggccaagattgagcacttcatcttccatggaatggaagagctgaatgattcatgtgaattcactatgaagaagcgaaagctcaacaataagaacccaattcatctatcgattgcaatctatcagctcgctaagctccgtatgttgcaattctactatgattgcattgacttctacttcgaccgttcggaattccagtaccaagaaatggacacagactcggcttatattgcgttcagctgtgagaagccattcgttgagtgtatcaagcccgagcttcgtgagcattttcagcagcataagtacgagtggttcccacgtgattatagcgaagagatggctcagtttgatcgccgaacgccaggtttgttcaaggatgagtggtctggtgatgctatggtatcattgtcctctaagaactacatttgctacctaccagacgaatcttacaaggtcaaggtttcagcgaagggagtccagcagagtggtggccgcaatggcgacgtcctcaacccagatggctttgaatcagctgttcgcgatcgcatcacgctacagggcaccaacaaggggtttagactcagtaaggagagtaagtcaatcattacgtacacccagactaaaacagctctaaactactattatgacaagcgtcgtgaacttgcggatggtatcaccaccgaaccgctcgacatataagcaactacctggcaggggatttttttgttttataaccatatagagcgatggatcagctgttgtccaaattatactatgaccccaaaacgggctatgtgggtgcccaagccttataccagaaggctaaagaactggagccgaagattacgatgaaaatcgtcaaggaatggtactcaaaccagagcgatattcagcgatttcaggagcagaagaagcgatacgatgggttcaaaatcgcatcgactaaccccaattcgtggcagatggacttggcgttttgggagaaaagaccaatcttgactgcgatcaacatcaactctcgcctaggctacgcaaaactactaaccaacaaaactggcccgaccgtactagcagcaattagggtttttgtccgcctccataaggttgacattctcacaaccgataatggttcagaattcatgaaccaacaggctcagaaattattcaaaactaagaaaattgaccatttcaacaatgagcctggagatcacgccaaaatgggtaaaattgaacgcttcaatagaactctgatgtcaaaatcgaaccaaagcgactaacccagaagctcatagctgctgttattgagaactacaatagcacgacccatcggacgattggtatgacccccaacgaagctaaaggtaaggtaattgaatctgaactagtccacaaccaggctgaagccgagaggattgaaaacgagttcgaggtcggtgaaaaggttttgtatcgtttaaaaaagaaaacatttgataaagaagcagcaagatggcctaaggctgtgtattcggtggtaggtattgatggctaccgcatccaaatcaagtcgaaaaacggacacactctttacaaggggccaaacgatctaaaaattgttaaagcagaaacatctgaagctactatcaacagatgtgatattttagaggtggagaagatcttagaccacaaaaagttgcgatccggcaagtacaagtatctcgttcagtgggtcggtaatgaacttgactcctgggagccacaagataatcttagattagtcaataagaacaagagatcaaccttagagaatgagtactggaagtcgataaaaaatgagtcgaactagcttcgaaataagtttaatagagcaatcctctgtaagcgttgactcatctatatctatcaatctattttccaaaaataatgcttaaaaatatatgacttcatatatagaatgtgttgcaactgcgtagagaatcaacgtgagcttgtacagctccgaagaaagctgtggataattcaagaggttagtcgaatcaaaaatgaactcagagatttagacccagtagccaatttccggaaaaccgtgtgcaatctacagtaccgcgaccagttagaaacgatatttggtgtgccgtttcattgcatcaaggatcgatacatcaatctcctcaatgagcgaaaccgtatctgtcatacgtgccaaccatttaggcatgactccgttatgccaagctattggtgagtatgtatttaatcgatgctaatagttttttatgactaccatgatatagttagacgatgtttcccaactttacatccctcgctcaacgagagaaaaagcggcaggatctactcgaacgagctgagcgccgagttcgtcaagccaagtccaagcgccttatgtacgaaggtgcatcatgggctagcgatatcgcgaatggtatcactactgttccaaagaaatcaacacaatccgctcagtctgatatttcggttggccctgacgaggctacgccggaagagttaaaaaaagtctgaatattgaaaactcccaaaaaaaccctgagtcctcaacaatggtagatgctgaagttaatgcaacacctgaaatgaacgatgcatcgactactgcaaagcctcagtccgttgatgattccagtactgctaagcccaaaaccagtgatgcacgtgagccccgatatgactgatgttggggttgataatagtgcaagaatgacagatgctggtgttggccctgatagtccactgctgcaaaagcccgtcgaagaagatttgttcgacgaaggcaatgctgagatgaaaaatcaaacaatgtcaaaggaagcggtcgctaaaatctttgaggtttaccccatccttgcagaactaaatattcaccctattgcttccaacggccggcagctcactaagtattatattgggatggatgctaaggtgtacagtattaaactgagaaaatatatactagttccgagcattgattggtctgagacgtatgaccatatttgtgaggtattaattaatgatgtcagattcctcgcatacgtcaatgagaaggagcgacgtaatgagatgggtaaagaggacaaaaatagcccataccaggtttggcaaaatattggctcaaaaagaaaaagaatcaatgcctcagaaggagattattcaaaccgctctaagcagagacttgacgacagttttgtgttcgatactggagcatccacaagatccgaccaaatggacagcaagctcaaattattttggacaattagcaaaagtagggaagtccttgaatctaacggattgataaagaagattgtaccaattcttaatggttccgcaaaatcttctcttattgacaaagatggctatgtttcgatcagtggcaatagcattagcgtttacgggaaagatagcgatcgtgtgaagcaagcaatcactcagaaagtgaactggataatgacattccaatctttcattaatatgactaaatccaggggcctcgagttagaactagttggtagcaatgaaaccaaacacataaatgatttgaccccagctaatggtgaagctcagcatgggttaatgagtggtattgatgaagacatggacccaagcctatcaaacgctgataacgacgccaagaatatcttaactgattactacagccagttgcacgctaatagtattgatattccatttcggctacaaccaatcgtgaaaatcaacggtgttgttaagtcccatccatcatactactttggggagccatcggggtctagacccctaaatatgttaaatcgtaaaaacaaagcacacaagcaggtgagttgtgtagcttggaaggggctaatgaagaatatcatgtggatggataccttttcgtccctactcaacgaggttgaggacttggaccgctatcttaatgaggttgaataccccttcccatcgagcgatgaagaagcagctaagatacttgaagaaaaggagcttgataagaaaagacgtaaaaacctggatgctaatcttgaagtattgaatgaggctattctaaagtctgtacacgatattagatagcaaagcgttgaagagtatgaatacgatgacagcttgcaagagcttcatgatgagtcagaagcagcttttcagacatacggtggggctcagaaacgctatgaagaagcaaaagaggctgttagagggaataactcaaaagcagcgagatcgctgttgaaggcagctacatcagctatgaaggcgacaaaatcgatatatcaaacgaaggctaagcgatacgccgaggcaagcgaggtatccggcagtggcgttaaacgaaagcttcaaggtcgaggattgcgcggtgcaggtgttaccccgctggaaggtgtagttcgccgaggccgtacctacaatctcaatgtgatccaaggattacagcctacacatacaagcagatcggaagcaagtatattcgtatccccgaccttgatgctaaaaagctcgtgaccgttcaggcgaatcggcgtaaatgtggtcctaagtgggaaatcagtgatagcctccaagccatgatcaaggcacttgtctataagaaccgtatcgatcaatccgcttacgataagctcagcgttgaagataagaaactgttcaaggaggttctattgattactcatctccaatacagcttccacgataagttagaggatcctctagatacgcttagggctgaatacgataagctaaaaggagagctacaactcggaaatgacaaccccagtatcatcaagcagctcaagtctctcacggtggatatgtacagcaatcgactgattgatgataaagagttcaaagatattatctcccgtttattataaaaccatgttcttcttcaactcgcgcattatatccagttccggaggcagctatggtgacaatagcgacctcaacgtcgctgagttgaatgctatcatgaagaacctcatcattcatgatcgtccccagaagacccaagccgctgtgtgggctactgacctcgacaagtcgaccaagaaggtggacgcatctacccaaacggaaggcggccgagtctgggcttaccagccaaaaaaaagtcaaagtctgtgaagatatttgctctatagagcagagcggatatactcagatatctacgtctgttttcttctctcgatagagtctgattttttttatctccgatatcgatagccatgacagcattcttgccactatgtacgttgtacattgggatatatgcattattccctatcgaaaccactccagcgtgcatctttattgaaccgatgacttggccagtttcagggttagtcaggttctttttgatcgttttacttggtccgcagcccatgatactctattacaacgaagtactcaagatctgctctatatttatcggtgcaaaattatccctgagccaataccatctataaccctctcgtggaattcgacaattcgatcacattgtagttgatcagtatcaacgacattagcgttagtagtctgagggcaagcggtcttcgccacgaactgggtttgacagataccattctatatttactcagacataatcgttctcaactcattgagttcagctttgagattattgatttggccttgctgttcttggatagatttacacagtaccgaggttaaactggcgagatcgattccccatggattcactggaaacccatccggattaagctcatcgtttgctccgatatctactgcttctggtatgaccttatacagctcctgcgcgatatagccaacatggatagtctgctcttgaaccatcctgaattttctcggtctcattctcataaggcttgccaaaccatagggacagtctacaatgtccgccttcaacctctcatcgcttgcattggtatagcttcctccacgcaccgggacataggctgtccacgtaattagcatcccattttcccaacctgatagctcctacggttgaatcagtaccaatcgctggatagtcagtctgagaccaattgaatcgatacctagcaaatccatcgccgcctccctttacgtgcatgaaattattcgcccatgcctctccgcctgagtgaatggttgcttctggcgaccacgtactcataccaacacccagtcttcctgagctgtttagataagcttgagttgtgtttccaaccatgaaccttagcgggtcgctcgtagtggtgcctagagctacaccactacttcctcccgcgacatcgttgtatacctgaatttcaaattcgattggagtagtagcatcgttggctatacgcattgcgcgttgccaagacccgcttagtaaattcgcgctcgaaactatatctatttttgcagtactggtagctgatccaaagcgaatgtatcctgcttgagtgattctcatacgttcagtcattggtgataatgcattagctcctgaccgtgtactgattgcaaaatcagccattgaatattgaagactcgtagcggttctagtacaatatagatcaacgctaggggtgtacgttgtcatatcactagtaccttcaatcgtgaacgataatccggcctgagcgccaaccgtattgctttgattacgaatcatgagattaaaatcagaggcacgcgttgttgatgtaaatgatgtcccggccgcaatctgacattgggtagaagtagtggatatcagtttggttgacgttagagatgagatacctgatgagatgctactattagagtctagtacaagagcctttgatgcttctgcagttcctgctccggtggtaagatctagatagttcagctcaacggtagatgctgtgcatccagcaagcttgttcagctccgcacctgtagcattgagagtatctcccctgagttgaagcgtagtaggattgatattcaaggtcgttgcattcatagtttgagtacctgacttactaatcgtatcacatgtgatcgtaggcgatgatattgaagtcgaagctataaagtttcgtgatatggttagatcgcgaatgccagagtaatctttcgtactattgagaacgacaacgctactggctgaagcgcccccttcgataacattgagaaagtaagcatgattgaaatttatccaagaactgactccatcccaatttcagattcggaatgaataagccggttccaccagcgctaagggttagattgctaagcgtacctagactagtaatattaggctgagcagcggtttgtagcgttcctgttatcgacgtcgctgtgagcgagctcagggttcctaggctggtaatgttgggctgagcagctgttgttagcgtacccgatacattacccgagcaatttacagcggttagagtacttaacgatgttatattaggctgagcagcagtctgtagcgtaccagtaatgttagttgcagttagcgagctaagacctgtaatggatcgacttgcaccagtaaaggttaaactgcctccgatagtcaatccagtaagcgtacctaagctggtgatatttggttgagcagccgtcgctagcgttccattgatgtttcagctcacggtgagcgacgagagtgtccctacactagttacgttggtctgagcagcagttgccaatgtaccagatatgtttccactcacggtgagggacgatagcgtgcctaagctagtaatattaggctgagccgctgtctgcagcgtgccagtaatcgacgttgccgtcaaactactaatagtagcaatttcacctgatgcaccaagcaccagagctttgttgatagcggcagtacctggagtaatatcagctacatacgttggtacgcctgaaacggaagcaccattaacagttaggctactacagcttagtgctccaagaccgctgatgttcccaccacttccagggacaagcgctacaccaggtgatgctacgccttgagagacaccggtaatgtacgtcaagcgatagtcatacttgttcagataaagtgcctgagcatagtcatacgttagaaaccagctggcatccaattggagaaagaatgccggattataaatcggcgatgtgaatatcgggctaggataagaaaaacctgaactcatctttgtttgatcctatatagtttagacgataatcatgagcggtattccagattttggagcttcaatccctaaaaaattcaaaagcgcctctatgggtgatattccagcacttgacatcaaagcgctgtttagaatggtggttctggggccatcgttctcagggaagagcaacttatgtatgttcatcctcaagcattctcctcacgtatttgctcatctaacgatcattgctcgtaatcctcaccaggtgttatatgagtatcttcgtgataagcttgatggctttatcacattcaccgaccctgactcgcctccgagtgatgaacgggtacgtcatacaccaattaattcccataagcctgagctcgtcatcatcgatgactacagcaacgataagcttcttcagaaaaatttgttctcacattacttcactagagggcgccacttcaagctatcaaccatcttcttgacccacacctacttcgcaacggacaagatgatcagattgaactcagagtacgtagcgatcctgaaagctaattctaagcgagacctccagatggttgtgaaagattttaatatcaagggagtagatgagcgttcaatcgtctattattacaacaaagccacggagcgaaagggccaaatgctcttcattgattcggtcaagggtcagatcaggtataacttcgatagaccgattcgtatcgaggactagttccaatttatcaaacaaaaatatgcctacaaacatataatcaatatgtccagctttatcaaactcgacagcaccaatctgatacaagatggaaccaattcaacctggaaatactcctttcccggatcggcggctgacttccgcgatgtagtatgtgccattcaatcgatttcgatgtataacagcgagtataacattgattcaatgcaatttcagaacacaacgttcaaaatcgaagtacctaccgctgcaactacatccacaatcagtgtatccctccctgatggtatttattcgtatgacgatatcaaccgaagcattcagactgctcttgtcaatgctggggcgtatctaatcgatccgtcggggaataacgtattctatatcaaaatgagtgctaacagtgtctattacgcttgtcagctggatttctctcctacgcctacaactctaccaactaccggtggaccatggaccagacctacctccggtttatactcctctggtggtactggattgccgactactactcgcgttcctcgactgatcatcgataatgctgaattcggtaaagtagttggtctcacagcgggtacatacccctccacatcagctactgttgcaagtgctcagctatcgaacatcattcctcagattcaccgaccagttcctacatcgttcgttgcgatctgatcaaaaacgaatacgtggcttctggtaatattgtcagtgcttttgatagaggtgatgccgctattggaaaggtcatttcatacaaaccgagtcagtatgcgtggatgaactgtcataatggcgctcgagctagtattacactcagtatctataaccaaaatgataaaaaagtgattttcagagatacgtcggtatccatcatgatctgattcgtaaaaaaaaaagacatccagagtattttgtttagggcggctacaacgtaaacgaaccaccagtcttacgacgtgcctgagcgcagccatcttagccttcatctctggcgaacccttcgctggacgtttctttgctacgcctacaccatagcggcgacgaacctcctttcgcacagatctgattagatcctcatgttccggcttggtagcttttgatagtaggaacttctctccagcatcgactgcgtcggtgatgacccccttgcgcttcgtgtatgcaagagcattctttgcagccttctttacgtcagccatggatacgcgacctccttccttgtcgctatcggaatcataaataccaatgccggttagggacttgattgcagctctggctggaacagcagccgttggctgaccagcataagtagctaaagcaggaaccgccgcatcaacggctctggatagtagacctgaatacttagcaaatttgtatgcagacttgatccctccccatacgttggaccagatagagcctccttgagccttttgtagcccttcttcacgtcgtgcttggtaatgtcgagtctgacaccgctggacgctgtttttcaaacgaagcagggtggagatggatgactgaaccactaccctttagttcgcttgaggtgaggctgagcttaccagtcttgaaagctttggtaagcttccgcgcaggaatatcactggagattgttaattcgcgatatatgattactgtatacgttgaattaaatttattccagaattgtcaaatttagatctttcattgttttgaatacatctggcttacggtattgcttcgaatatagccataggacacagaatggtccacagtagtctccataggttccttgatattgcttggtgttgtatcgatcgataccatacttctttggtggtccttcccccatactatcgaagaattcaccattatgaaccgccgtccagtgtcctacctcaagattaggagggcgaagtagaatcagaaatgaccctttcttggggagatgggactttatctcatttgattcaaatatattatcgagttgaacgttcattttctcagcgagttcgatgagatcatgatctgaggtgattggcttgatgaggtgcgacataatatttaattttatcaaactatattaggatccatatagattcaacgatgagcgaaactcaactatccgatcagtacctgtaccagagctcgcttaagagcgacccggagatcaaggtatcttcgagcaagcgtgtaccgcacgttattgacctaaatcagggttcgtaccagaatggtgtcatcactatcgatgctacggctcagcttaacggttccgagggcttcgcaagccttcgtgatgcctacattatgcttccctacaaggtctcaatgaagaatggtggcactgctcaaactgccgctgccaatcgtctatgtgctactctaaaatgcggaaattagaacgttattgatagtctgagtctggaactcaacggaagactatcgtctctatggctgactacaagctcttttggaacaacgttcgtgctcagactggctacagccctcagtacgttgaaaagcacggagctgaatcgttcttgtaccctgatgctgctcagtcggtatcatgcagttctggatccgcatctaccagtggtgatggatattcaaacaccatggcattctcgtcttcctttgctgtctcggctcctcctggtggtgcagctattcctaatgatggtttcgttaagcgctttctatcgaatcctcctacggctggcgctgacttctccagctcgtggccgtcggtaggtggtgctgttgcatcgactaccatttctaaccagagctttcgtagctggcggtactgctgctaacgcaatcatgggaacgtggaactacatgcttaagattaagctcaccgatctgcatcctatcttccgtgagcttgacttgatggctaaccctcaaattcgcctgcgtttccgtgtgaatcagggaacgtctgtagtcgcggtagatgcttcaaagggtatgtcgctaacctctactactctatcgtctggtaatagttgtccggtcatgattgccgcttctgctaccggtaatctgatgaatggtgtgcttgccgcatctgctggctttggtgttgtttggggagcggttgtaaatgctcttgaacctaccatcgatggtacatacatgccttttactactgctcgtttgtatgcccctttcgttcatcttgagaaccctcaagctattatctctaagccggttaagaaggttcgctacaatgattgctacgcacagtggttttaccagcgtgctggtattgataagtcctcgactcaactaaatgcttctttcgatttacagctatcggcaagtgttaaaaacgcgaaatatgttgtgcttttaccattcgcggaacagacaaacaactttgcttctgctactgttcagcagttccagagccccttcgatagctctccatacacgcttcagcccgggtcgtcgattcgcaactttaacgttcgtattggctcgactcaggtgttcgatatcagtcatgactatgatttccaccactttaccaacgaaattgctaagatttcagcgattaacggagatctaacccctgagctcgtaaatggtctacttgactatcagacgtggtcgctcacaaaccgcatgcttattgccgatgtcagtcgcctgactgagcgcgatgtacctcaggctattcagatccaaggtacgaacgccggatgccaaggtgtgaatatgctgatcctcgtaattagcgaagaggaactaacgttcgatagactaaccggagaggttctagacttcactacagcgtaagtaaaaaaaagagatattttttagttcagttccttgagtagctttggacacttgtcaatcacgaattgactttttcttagccaatcgagatagcctggtagcctggatccaatttactgatctgctgtaaagatttgcctcgattcttacccccacgtcatcatattggagtcatcgttattgaggaatcttgagtgaagaaagattttcatttcctcgctaatgttgagattgggttggttgtgaatccaacgacagtatccaggatcattcttgaatacatcctcaatggattgacctttgtattctccgaacgatagttcgatcgtcatgttctatgtgtgggtatctatatacatagcctcttaatttttttgaaaaaaaaataattctgaaaaatgacgtcgtaatgtgccagtaattattgggagtttcatcttaccctcgcatgtgcgattctgcacaactacagggtcgcgcgtctggtcgctggctaacggacgcctcctcgagctctgaggtggttgagaggtcgtgtaggtaaaacggacgactatccacaaagatcgttctagcaccgttctcggaggtaaattacggtaagaaattatgaaaataaaaaactgccggcgtaatgtgccgcgacctactactaaagtgtacaacagtgtacagaggacggatgtcacgagctgtggtaagcccacatggcgaaatacagctgttgtttctatgcatatagtagaagtgtccctttcaccccctctccgtcgatctttcgcaatgattaaccgctccaacacgtcgaaatccccgtcttcaacgtcggcggtcagtatgagcgccatgctgcgctcgctgaggcgcgtttggctcggcagccgcggcgcggacggcctcgaggggggcctgcgccgcctcaagccgccgccgccgctgccgccgcacagcagcaagccggacgagtccaaggccagcctcagcaacgagcagcggctgggcgacgtcgtgtggaagcccgagcaggagttccccggccgctccgtggtcgaccgccacgccatgacgccggaccgggagctgcaggtgctgcgccgcatcgcgcgcgtgtccgtacacagcatcgcgcagccggcgcgcctggcgctgctgggcgtgtgctccagcggcgtgatggggctctcggcgtacgaggcgcacctgctgctggacccggcgcagcccgcgacgctcgactcgctgctcttcatgtacaagtacgcgacgcacaacttcctggccagttgcatctgggagacgcgcgcgccggagctcgtggcgcaggcgctggggcttgacccgacgcaactgctacgggtcttccacccggccacgtcgagtgccgacgcggcgctgcagctgaggatcatgagcgtctttactgctagagccatgctggccggcttcatggtggtcacgcagctgctgaacatcgtgcgcgcgagcgggacggcggcgatggggtactcggagaacgtgtacagagggcttgagccgcccctgcagggcatcgaagaacgcattatccgactgtcaggcaagggcagcgacgtcacggaggtgtccatggctcgatatggggcgcacatcctgcccgtgtttgaggaccccgagcagcatcggcacttggtggcactgtggtcgctgaacggccgagtgccgtgcgtgtggtgcgtgcccaaagaccgctacggcttccgacactcgtggactggtttgcgtgtcgacgagtcattcttgctgcgtacgactacgggcaagtacattctgtgcattgaggccgatgctacgctgcaggacagggcgttcgagctgcgggtgatgcccaaatcacctctgcccaaggacgaagagctctcggtcgaagaagcgtcacaggcttaccgccttgtcgagaggcaggcggcgctagcgcttcgacgtccatttcgcagtctttgcgtactgttgggggactcgcgccagccgtgcgacctcggtggggactccttcgttacgctacgcgaacgaacgcggctcaagcaggaggtgaacgtgctcatcgactccaaagcgccattgcttctggaggttctcaagtggtgcggacgcttcgtcgacgaccggaagacgctggtcctggacgtgacaccacacaacttcacaccgctgaaggtgttccttgaacgtcacggatatgctgtcctgaccccagctgaagctgttgagttcgaggagcgtgagcgagctgaaatcgctgcagaagcgaaagcgaaggttgaagcagaagagcaagaccaacgccatcggcaagagctagaggagcaagaactcgcgcttgcaggctcgacatcgcttaaggggaggcaaagtgaccccattcctagtgggaagcagaagacaagtggagatccacaagcaacggagaggaacggcaacaccggtgctgccgaggataaaaccacttcagagggaaatgatgactcaactcaaaaggacaagagcaaggagaagggggcgaacggtaaggagaatgaggcgccggctgcaagaagaggcaagaaacccgagaagcttccccgactcttgtattacccgacaaccgccgccactatcaacgctgttcacgctacactaacgtctggcgatggcttgtcggatccacggcgatgctgcgtgttgatcaaccagccgtttggtcttgagcaccttgacgaactagcagaagatgcaggcgagaagttccatcccgtgtgcgctgccgagatttatgacgactacttccgccaggtgcgaatctggacgcgaatgggtcactctgctactgtcatccagcgcgaacttgaccaacgttttgaacctgttcgcgatgttttggacgctatcgcggccttggacaaggcttctagctcaaagtagtggctcgaataagtgcgagtagattaatgatacagataaatggggagaacctctacaattctcaatcaaaagagactgcgtgcgagaagatagcacgacagcagcaagcagagacccacgccataaacgatcatctttgcgatgatccggcaagccaccacgtccgcaggctgcagagcaccgtgcttgatttggcgttgggccagcaccgctgccatctcacgagcctgacgctcagctgggtcacgctgctccgtcaccgcttccgcgtgagcgtggcgacggcgaagagcctgtcgcagaggctcctcgtgccattcaggaagcatcacgggcgtcggcatctgcgttgtttcatcgtcatggacgacctcgtcggttttctcctcgtcctcgtcatttccgaacgcgtgcgtgataccgacatcagcggcagcagcggcctcctcctcgttcttaggctccggcaccaccaaactggccacgtactcggcctcttcacgacggcgctgcgtttccacgccttctttctcttcttcgtcggcagcgatgacatcaagcacgcgctgaatctcgctgagcatcgacgggtcgacccccatcttgagcagcacctccttctcaatgcgcgccgagcggtagccgctattcttctctgctggtgaggagatcgaaacgcgacgcctcggtcccggccgaactggagatgagaccggcatgggaccatccatagacgcaccagctgcatacatgcccgtcatcggggtccctggcgccgacgacagcatcgactcggtatcgaagctccacctcgtgtcggccatggaggatgtgggcgagtagggatgcttctcgtccatttcagctgcttgagccgcctccatctcgtgctggaaagcacgttcttgctcctgctcctgctttacatgcacctgttcttcttcttccccctgctgttgttgagcgttctggcgtcggagctcctcgctctcgagcgtgtgcagcaggttggtggccagctccgccaggaagatggaggactcgggcgacgcggccatctcggtggcgctcgtgaggcactcgctcatgctggagatgatgcggcggccgtcgtcgctggcgaagaagtccacgacggactgcagcgtctggaacagctgctgcgtggccgccttggtctcgggcgtgttgagtgcctgcgcaaccttggccacggtggccacgccgttgagcacgacgtcgcggccgctgcgcgagctggcggcgcgggcgaagtcttcctgcagctgtttggtgctggcgcccaggcgctggccgcgctcggcgccgaagacgcccagagcgttggccagcgcggtggccagcagccgcgtcaggtcgcgcgcgcgctgcggcgtcagcgtcttgaggcggtcccagagcaggaagctcagcacggccgggttggccaccgacccggccagccgcgaggccacggggttcaccaccgactcgtccaccttggtcgtcgcccacctggtcacgacgccacaaagaatacacaggttagtaacgttgctccagcaaggccaaaggcagccagcccagccaagccacgcccacgcaccgcacggcgtccacgatcatgttacggcaatggagctaatgggacaatgggcggctcctctggaccgctgcacttgcctcagttgcctttgtgacgcggctcggtggccgaataacgacgcttcgaaaaatgttcggtcggcccggctctgctcccgaaccctgcgaaacgcgatgcgacccggcgcgtatcacttttgtcggcgctttttcgcagtacccattatcgcatactttagccaagtgatcccgacagcagagcgagatggcggcgcgaggggtgaacggcgcggcgagcggcacgctgaacgagcgcttcatcaagtgcaagggctgccgcgtgaacgtgcccaaggaggacatgctggcgctgggccagtgcacggtctgcgcgcgcccgtacgcgcccgcggcgagcgcggacggcagaggcgtggaggtgacgaccgtggccttcgacggcgtcggcgccgcccccgcggaagagaagaagccgcggaggaagcgctgggccgtgctctcctcgaagcgcgggcgcacgtactaccacaacacggagactggcgaggaccgatgggataagcccgcggacctggacgccgacgcggcggaggacgccttcggtgcgcgagacgcaggggtctgaggctgttgtgtagaagctgctgtattgactgtgtatcgcactgctgctgctgttgttgctgtgatgcagtgccgttcaagaacgacgcggtgaagaaggcggtgctgcgcgagcagatgaagctggaggccaccaagatgggcgtccccatggaggtggtggccgtcacgcaggagcagctgcagcacgaggccgaggccgacgacccgttcgccaagatggtgaatcgcggcgccaagcccgagagcaagaagagtccgccagtgcaggccagcagcccaaagcagaagaaggcgccagcacctgcagcagcagtgcaggaagacgaagaggaggaagaagaattcgaagaggagatagcagcacagtatgcacaggacgcgtccaaggccggcggatcgtgcgccgtcatgtgattgtccccacttcaacgtgccggtggacgttctgtccaacgtgcgtccaactagcgatatgcgtgccgaatataagtcgatctatttttatccaatcacatggcccagaaatcgttcgattgcggttcggaaggtggcgttacacttcttccggcgcttccagcaagccgattctcggctcggcgccgccctccacgacgcgccgcgtgacgccacacccgccgctccttattcctcacctgactagcagcagctaggcgcctccgccgcgctcgcccgacccctgcagcccgagaaaagtccgccgcaatgaccagcaacggcgcgctccagtcgccgctggtcatctcgacgctgccgcgcccgccggccaccgccggggccccgtccacagctggcggcatctcggccgcttccttgtcgcctgcgccgtcctccgccagcgcgtccttctcgccgtacgccaagaacccggcgcttaacgccagacgcgtcgccatggagggcaagagcctcttcacgtgccaccagtgcggcgcactgctcaagttccagtacaaccccgtgtccatcgaggagaagatcatgaagctgcgctccgtggcctacgagcacccgacggaggcgtgcgagccgcgcgacagcaagggagacgacgacgaggaccagatcccccgactcacggagggcacggacgccggcgagaccacggacgcggacgaagaggaggaggccgtgcaggcggccaggtcctcgctcagtcagctgcagcagcagaagacgcccgctgtcgtgccggatatcgtgtgggagcgacagcgtctcgacagcagcagcgacgtggacgtctgggccccggccgagttcgacctcatgaacggcatcgcggcgttcacgagctgcaaccgtggagacattggacagaacatcgctgacgtggtgcccgcgcgactgctgaacaagccgcacctgtggatctcggactgggaggtggatcactcgctcccgcactgcgacgaggaaggctgggtgtacgcggcgtcgtacgcggactttggcaggatggaggagccgcgtgtgtcggaagagaagcgagcagagcggaagagcgaagaagacgcgtctgaactgaagagcgagtcgaacgatgaacgtctggtgcgacgtcgtcgtttaatccgcaagcgccgcattgatggcagcgatctcagctggttccaggagctacttgactgcaggtaaagtctgatcacgagctggcgaggagaagctcatggctgactgacgaacttgtttgttgtgaatcggtgatgacttccagcacgctcttgctgaaaaagcgactgccaacttgccatgattgcgaagccacagtgctctcccgattcacccagtacgtggcattatatggtactgctgcactgtgttagagaaaataatggtggttgtgactggtttattagggcgctggatgagttggaagaggatcgagcccagtacgaggggttcatgacgcagtttactgaagaggaacgtgcttctgcgcgagctttcagcgtgaatggcgactacgatgatgacgagtggaatgatgacccagagcttcgcgcgctggaggaagaagagcgtcgactaaagtctgaactggaggcgatcgaagacgagaccgcgcaaataacagcgaagaggcaagacttgtggtccacgggaacggaccttgagcagttgattcacggaaccttcgccgagggcgcctacttgcagcacttgctgggtctgagtcgcgacgagcgtcagtccgtgagtgtgttcaacgtgcacgcgtcggatatgctgcgtcgccttcagcgctacaatgtctgcaacgacgtcttccacatctggcacgacggactcttcggtacgatcaacggactgcgccttgggcgcttgccgtcaaagcctgtggagtgggtggaaattaacgccgcgatggggcaagcggtgcttctgctcgcgaccatcgcggatcgcgccaacttcgagttctcgcgcaatcgcctcgtgccgcgtggaagctactcgcgtgtggtcaacatgtatggcaaggagtactgcttgtactgtgacggtggcatgttcaaacgccgtggattcaacgcgggcctgattctcttcctcgagtgtgtggaggacgccggccgtcgcgcaatgaaagaggagccctcactcaagttcccgtacaaggtggagcgtgggaagatcggcggcctccccatttcgctcggcaacgatgagcagtggacccgagcgctcaagtacatgctcacgcacctcaagtggctcctagcttggatctccaagcgctactgagagacaacacaacgtctggacaaaaagtgaactcaatgaagaaaagtcggcagcatatctcgccaggaaatcgtgtactcgcgccatgacagcgcaccaagtaagtaaaacgtgtctatcttttgcgttagcttggagtttgattagtacttcagtcgttagaacacgcggttgatagcggacagggaggcaaagagctcagtgcttcagcgtctatgaggcaacgttataaggtccgtccgtctcagatacgcttacatgagctgctgaattgccttgtggatggcgttggcggcatacagcaactcttcctgcgtggtggaccgacccaccgacagacgcagcgtgcccttggcgaactcgggggccacgtgcatggcagctagcacgtgtgaaatggtaatgcgttcctcttggcgctcgggctttttctgcttgtcgccgtcgttgtcgttgtcgtgctggtggctgtggcaagccgatccagcgctagcgtagacaccttcagcctcgatcactggcacgcacgaacatgaacagaaccagcaaaaccacaacgtcagagaccaacaagctgagggagccagaacacaagtgcaggctcacagtcgagaatccgaggcgcgttgatgttttcgaagctgatgctgagtgtgttgggcagcgacagctccgggtggccgttgacctggtagctgacgttcgtcaggctgcagtgcttctggatctgctcgaggaggaacgtcctgctctcctgcatgatgacggcgtactcgtgcaagttcttctccacgagcgcgcaggcctgacccagcgccgccaccagcgcgacgttctccgtaccgctacggcgtccactctcctgggacgcgccgtggatgatcgtgtccaccgccgtgccctcacggatgtacagcgcgccgatacccttgggcgcgtagagcttgtggccggccaccgtcagcaggtccacgcccaggtcctggacattgacgcgcactttgccgatcgcctggctggcgtcagtgtgcacggcaatgggcaggcgctgctcctgctcgtccgcgaaccgccgcaccgcgcgcgagatgtcggccacgggctgcagcgagcccacctcgttgttggccagcatgatggacaccacgcacgtctgcggcgtgagcgcgtccagcacgtcctgcacgcgcacacagccgaagcggtccacgggcaggtatgtgacccggaagccctgcgtctccagccacttgcacgtctccagcacggccacgtgctccacgcaggacgtgacgatgtggctgcgcccgctctcgcgcctggcggccagcgccgcgcccttgatggcgtagttgatggactcggtgccgcccgagaggaacacgacctcgccggcgtccgccgcgcccagcatagacgccacctgcgcgcgcgcgacggccaccgcctgcttggccgtctggcccagcgcgtacgaggacgacgcgttgccaaactgcggcccgaggaatggtagcagcgcctgcagcacggccggctccacgggcgtcgtggcgttatagtcgaggtacacgcgcgtcatgttaagtcggacttgagctgagttgagctgctcgggtcgagaaccgaagtgcgaagtgagactgctgctcatcaacgatgatggagatgggtaacacgagtggacgattcgctgaaatggagcggaaggctcggcgaatggcggcgtgatttactcagatctgagtccaacttcaacttcttgcacttgcaaggcggagctcgctcggactgaaatggccttagcattggtgcaaccgcatcaaggtaatagcaacttaccgctgacaatgtatgtccacaggctcatttagaaaggagagcccggtcgggtgaatcttggcgagaaccgtgcgcgaaaagcagaatgtccgcaagaagtccgggggaagtccacaagaagtccacacgaatgttagctgaagctccagctaacacgtgtgggctagatcgtgtaattgacagaactgcagcgttgagttgcgatttccacaccttgcagctcactagagggttctctcgagtaaggcctgccgacgctgatacacctaggtcttacggtatctcgagcatactaagtacttagtatgctaagtattcggttcttggcatttcctccttgtttgtgacaaccatcacggcataattccaactttcattgttttgaactcactttcattttcgattttttcttcaaaaaagttaggcgaacgtacgctaatactgccttctggtacggaaatcatgttcataactacatgtacatacttgactggggggggggggggggctccattgacgtggtgccaatgaaatttgtgatgtgccgcacacaacttcaacttgatgagcaaaatcatacttagttgattatcctcctgtggttacacgaggcagcaaatgtagtaaggtaccaggaaaaaatacttggacatgtacgcagccagcgtgaacatttcgtcgtcaaggccttctgtgaacttccaattgcaccttcttgtcaagagtctcgagttgtgttttacatgatttgacgttacgtgatgttatcgccatcaaggggaaattttcaggtcttcacattggactgcggtcggctgtgaagctctattgatttcataactgtttgtttcttgttagtgtacgtttcttacctagtcgcaaactaacgttaatttgatgtttcaaatgctgccgtctccattgtcaagtcatagtcgatctccagagtaatggatacacatcaacagcagttttcgaagcgagccgcttcgttctgcagaatgacatccaaaagcacatctttgataacataacatatagcggggcttactctttcgagtgccaaacgatcggccatgggagctcatgttcggccccccgacaacactattgctgtgaaatatgacttattccgattcgtcttgtggacatgcttctgccgggaatgtcctctgaaaagaggtgacctccaaactttggagacccactgcgggttgaactcagcatcattttcctgaactctgctcaatatgcgtgaaccagtgcttcggctttggacactttgcttgagctgcagctcaagctaactcagagcagcgttaagtgttgctacctacggatactgtacaaatgtacgtgcgatactatttctgcatgaccgcaaagcccaagaacgctgctgtagcagggatctttcccgatttccagcaatatatccttaatccttacttgtacatagctcctcagctgcagcccaacatacagtagaggcttcataagctgctttgcgcatgatgcgactcgggatgggatacctggtaactcatcatgcggtcaccggatacctggactcaaactgcaaaagccccaaggtcaggttgcagcctgcaacctgaggttataaggcctgcaacttgcagccttataaccttgaagtttgtatgaagtattgaagtaccgtgatcctcgtaactgatagtctcaccatatttccgagccaccaaggtctcacttcccaattgaagcgacgaaaaatggcaggcgatggaagttcgacggttcgtgtagccccccgccaccagcgatggagacctgatgcaccccgaggtgacgctcagatgaatggaccacgcactaatgctccttttgcacaacttttcgctgtgtgtggtgctctgtagccctcaagccagctcccgacgctgctggttcgttcaccgcgcccctcctccttggtccgctgatcctattataacaacgcgttgcgtgttgctattaactccaattacaggggagtgcagccgctggcatgatcggccgcgtcttctgccacccgctggacactgtcaaggcccgactgcaggccagcacagcctcgggccaaacgatcgtgtcgcagctcaacctccgtgccttcaggtggcgcatagcaactatgtcagtttggtttgacctgcgttggagtctaaccgactatctattctgcagtttgcagcacctgcgcggactttaccgtggtctgggggtcagcatgctgggctccgcgcccgcgacttgtctgtacctgacgtcgtacgaggtgtcgaaggacgccctcatgggcgtcgagagcttccgcgccagcccgtcgctgctgtatctcggggcgggaatggcggcggaggcgctcagttgtgtgctgtgggtgcccatagacgtcatcaaggagcgtatgcaggtgcaggtgcagtcctcgactgcgtcgggggcggcgcggaaagtctactaccgcaacacggtcgacgctgtgcaaactattgcgcgtacggagcgcctcggtgggctgtacaagggctacgttgcgacgctgctctcgttcggaccattctcagcgctctacttcatgttctacgagaagaccaaggctttcgcgcagaagcgactcgaaatggaggagctgccggcgcactatacacttgtcagcgcggcggctgctggcgctacagcctcgtttctcactaaccccttggatctgatcaagctgcggcttcaggctagtggcgtgatatatttctccggagttgtcgtgtttgaggctaactatttcttaatgtttggtggcgacaggttcaacgcgcctacgtgacggaaggaaccccagcagcctaccgtggaattaccgatgggctagcgcaagtgatcaagtacgtcgtcgtattgctcgtgctgtgtatttactgatcgacttccttggtcgaagcgctgaagcattgagactgttgttgttttaaatggcgagcagaactgaaggcgtgttggccctgtacaaaggcgctggtgctcgcgtagctttccacgccccgtcgaccgctatcacgatgtctctcttcgagagctgccggcgggtgtttgcctctctcctggataattagatgcgcaattgtttggcgtgcttactgcctcctcttcgcttttgcttgacccttctcggcccctttcactggttgggcgtcgttagacagcgacctcatcgcctgaaccccctttggaacctgctcttgctcttccttcaccagcacttcgctcttgattgacaccaacgctgtttgttgttctgctgctttccctccctgctttcgtgccgcacggggtggaatgagttgtcgtttctgcttaccgccgttgccgtcaccaatagcccgcttctggatcacacctagtagccgcggttctgacttgccgttgtcatagcggagtacttcggtatgctcaatagcaccacgcagctccaacttctcccgtttccgcttgagccgagatagctcgaaggcctgctcttctgcaactacgacgttctcccactcttcctggaggtcatccaagtcttctgcagcctccttggaaatctgcaccgtgttgtactccattggagctccaccgccacctccagccgcagcattcttgccgttccaggtcgataccagcagcggacagtcatcgtgtagacgcaactccaacacgcagcctgccgatataccgtgctcctcaagcaccatcacatttgtctcttcgccgatcagtgtgtcaccccagtaaatctgttgatcccatatcgacaactgctgctccgtgagctcctccatccagtacttaatgtagttgacggtatggtgggagttcacgaagatctgcaacagattctccttgctgctcttgtctggcgctggtttagacggggattcttcgtcgtccgagctgctgtctgcagcctcttccagctccaacgccaccttcggtaggatagcaaccgcaggaggaagtttcaggaaaatgtgaaaggaagttgtctctgagcgctgaattttagcagccaagcgctgatgcaaccgcttccgcaccggtgaggtctcccgctcttgctcccggtcacgcttgaactttttccgagtttcacgcctgggggaccgttcatcgccagcattttcatcgcacccgtccgagtttacacgctggcgcttgttccgagccttttcatccggcgggggcggagacaacgatgaaacatctcctgagtgctgcccagagggatccccttccagcagatacccagtcgtcttgcccagcggcagcatcaccggaacctccatctcgacggaactttcatcgccctgtgcgtctgagtaaaccacgcgacgtgtacgcacgtccgtacctgcttcctcccgttcacgaccataaactttactgctcacccagcaaatgtagctgcccatgtgcagctcctgtcggtcacactgctcgaacgtgcagatatgcggcgttccgtggcggcgacaggcataaataccgtcttccaggaactggaagttgtttcggcaatgggtgctctggcagtcggcaatcttttgcacctgaaaccgcgtgtactgatcgcccaggtggatttcttctgcttcgaacgtgcaggccgcaggcgtaacaggagctccttctgcttctcctttgactgctgctgctgcttctgctgctgctggaggctgagcttcttcctcttgcttgacctttttcagcgcgggttctccttcctcctgctcactaggaactgttgggttcagaggctgctgcatttggcgctgtagagcggcagcttgcaactggtcgaacaaccaattctgaatgagccagtacgctcgcataggacacacccgccggtccagctccgcgtcgccaaaggtgctggtgcagctctcgtcacacgcgtggatgtacttgtgcagcaagcagatgtacacgcggcggcgtggcgagcccgagcactcgagatcccggtccatgctcacgatcttgccgcagcctttgcccgtgcactgctcgcccgtctcgaagcgcagctccgtggcgttcagcgccagcagcttggcccactcggcgatgcgcgccatcacgtccatcttgtgcttgacgcgggccatccactcgagcgacgcgaagtccgtcgaggcctcgagcttgatctggtccttgaccacctcaccgatcgcctgcgactgctgcggctgcgaggcttccagcagcttggcgtcgtaggccgcgcgcctctcggggtcgctcagcgtctcgtaggccagccgcagccgcgcgaactgcgtcgagtccacgtcgcgccgcttctcgtcgttgctctcgaccgtctcaacgtcctcgtcgtcgtccactttggctccacgctcgcgctcgcgcttgcgactcgcgcgcttcttgtccgggtgcagcagcagcgccagcttgcggaactggcgcttgacgtcgtccgtggagacgccggcggcattctcgagctccaggagctggtagaagtcgagcttcttcttctccttctccttcagcttcagctcggccttgtccgccgcgccgccgtcctggtacgggttccagctgcgcgcgagctgctgcagacgtagctccacggcgcgccactggccgctcgtgctgtcgtgcagctggctgcgcagcgtgcgtgcgtccgcctgtaggatggcgcctctggcctggaactgcgcgatcttggccagcagcgcgcgccgtttctgctgctccgcgggcgacaggccgcgcgcgcctgggcgctccattgcgtcaaggaaactggcggcgacggactcgctggacgcgcgagggcgagcgcagacagttacgggcgggtaaggagctccagctttgtgcccctaggaagagcaggccgttggatctccctctacaggaacttgaagtggacgttgacacccctctactggaacgagctaaagcgagctggaagaggtgcacacaaggcgggcggtcattgccgaaaaagctcaactcaactcaagtgtctgacaatctgctgcccaaaatgctccgctcgggcctcaagcaacgctggatggtggtgacgacggtggcgctggcgctgatggccgcggcgacgacgacggcgacgaactgcaacgtgaccgagtcggacagcgccagcgactcagcttccgattcggcggactctgccgactcggtggacttcagcacgcccgactacgacacgcccgacgccgacgacggcatcgacgaagcggccacccaccagagctgcttcgaggtcgcgctctggtgcgagtccctggggatcgccgtgtcgcccgacccggccaacaactgcaagtacccgtgcccagacatcacgcgcggcaacgccgactaagaagacaagacacgcaggggaagcatcgatcgatcaatcaagacaatcgacgacgaccgcaccgctccgcgtacgcacagccaccagccaccgccgtgctcaacaagtacatactacaactttttgccacccgcaagtagagacaccagggattaaaggcctgaaatacatccatgacagcttgctcgttctcgatcttcactcttcagtgaacctgtacataccggtatctacaccataaaacaggccagcgattctgttgatatgcactccgttgctggtctgcaacggtctacttggccagcgcccgcagcttcttgtcctggttgatgaggtcgatgacgttatcgctgataacgccgtcgattgcgtggcgcttctgaagctgcaccatttcgtggttggtgttctggtcgccccacgtgatgagcacagtgcccagggccttcttgacgagcggcgcgagctcgggcgtttcgatgaacgagttggagttggacacgatgccctgcagcttctccatcttggcgaagttggtcgcgaactgcagcgtcatccgcgcgtccatcgcgtgcggagccatggacccgtaggtcaggaacagcacggggtacttggtctgcttggcgcgcaatgcgatgcacacgctcgggtcgaagcacgagaagaagatgcgacgcgagccggcgtagtcgaacacgcactggaggaccttatccaggtaggcgttgatggcgaagcagctcagattgcgcatgcctgggcggaaaaagttgtcggggtacttgatctcgatgttgaggccgacttccgctggcacgtgcttgagcaggtcttccagacgagggaagaaatccacgaggtggccttcctcgttaacgtcgtcgtcgtttgcgacgagcgcccgtcttggtgaagggagctgcttgtctccttggagacgcgtccagtgtttcttcacgcgcttctggaattcctggctcttgccgcccttgtgcggtaccggggtcgtatgcgactgcgtgagctggcggagggacatgtcgtggatgccgatctcgtacgtctcggacttggtgccgaaagcctgcgcgcccttgtcttccagaccgacgttcaccatgaagtcgtggtagatcactggcacgcgatctttcgtgagctgcacgtcgaactcgacaaagtctgcaccgctccgtccagcgagaatgaacgatgccaaagtgttctctcgcgttagcgcaaggcggtatccgtccacttggtagtaagaccgccccatgcctcgatgaccgatggtgagaggcagacgttcccgccagtaggagcgccacacgttcgcgatgttgttcttggggtgggagaagggcgtcagcactaggtatgacagcgtgagctgcccaaccaatcccattgctgaatggaagatcggaactgtcagctccgcttccccatgcttaccaatttgagacgggagcaggtatgccgaacctaacagctccatcttggactccgcgtcgctctggtagctgtagatatccaacggccaccgatgtgagagcccgttgctcgggttccaacttccgtccacaacggcggcgggtactttgacacggaatacctgagcgtgtgtgttgtccatgaagtgcaccgtggacgaagcctccgctgctgagaaatagagtgccttgtgtattgctcgaatgtagtcggcccgaatcgaagacgccttctcgttccccagagcagcaaggatttcgtcaagttccaaaacgtgcaagaccacatcagtcttcgccttgaacaacgcaggctgcttagaccagcgcccaaagagccccatctcgttaaagaacgtgcccttgcccagcgttccaacgacattcgatcctgtggaggatgccggacccagtagctcgacgtcacctgattcaacgtagcagacagcgcgcttctgctccgcgtaattgaggatggtctcgccctgcgagtacttgcgcgtggcaacctttccagctagaagctcaacgtcggacgcttccaaagactgggcaaatgccaaccttgacacccacgacaccgccgatgatggttgggtcgtaggccggttgggatcattgttcagataggcagaaatgtcagtcccagcttgctgttggtgcacttccaggagctggcgcagctcagtcgactccttgtccaacaatgcagcactcttcgactcaactgggagcgattcccattcaactgcggtgctcttgttcccatttggctccgcttggttgtgtccattcgtttgcctctcatggcgcatttcaatcgccactcggttctgctcaggttccttgttaacccactggatcgccggcctggtagagtcaaagcttccgatccacagttccagctccgccatcttagcggcggggttcagccacccgctctcgacctgttgctgaatatcggcatcaagcgcgctggggacaccgtagaaaccatcgtcgcgtttgaggcacgaggtcgttttctgcggcgtgttcttgccagcgactgtggccgcgtcatcttgcgtgaaaatctccagctccgcgaactgcagcgagcacgcagacgcgccagcgtactgcagacgcacgtagcgtcccgcgacaacctctccagcctccaagtccagcgatcgcacgcggctgtcaaaggcgccctgcacttcaatcgcccgcacagcagacgcatcactcgaggccttggcttgtgcgtcttggaacgaccccgcctctcgacccaatggctgcttggagacgaacacccagagcggaggagcgggggcagacgtcgacgccttggacgtcatgggcgggcgaccgtccgggtgcctcgcctgctcatggtacgtcatggcgttccacacgtggacgctagagatggcgtaatccctgcccagatctacttcccaccacgggttggcctccttgttggtgcggcagcagcgccactcctggaagccgttggtgctgccgttgttgcccagtttggcctcgcgcgggcccggcgccggggcacgcgtcgtcgtgtaggtcgaactctggttggaagtagcgccactacatacacagagagagaacatcagcagcctctctcgactacagctacgatagtgtccagcacttacagcgccacgttggtgccccgcgtgatcgtgagtgtccggttgcctggcagtccctcccacgactcgagctcgcgcgtctgctggtgcttgaccacgtacttgtactcgagcgtgctggtggtcgcagcgaacacgaacgacgcgcgccacgagctctcgccctcccgctggcccacgagctccatgggcactgcgcacagcacgccgtcagccgcctgcatcaatcaacccaagaggacgagcacgcagacgcaccggccttctccacgtcccaggcgccgagctccggcgcgctgcccagcagacacacgacgcgcgcgctcgcgtcgcccagcagacgcacagcgaacgccacctcggtcatggcggtgatagtagctctactctacaggtacgtagctcctcgctccctgcagcgctgattcccgaatgaatgagagcgtgagcaacggcgcgcgtccagcagcgaatcttttctgcctcttcgcagaggatgttgcccctgggtttacggactgtagctacttcagtgaatcgtggcaggaatctattttggctgtgaaggatttcctgggtttagtgactcaatgaggatgggaagagagagacagaagcggtgtacactgacctaataacctgcatccttacatcctcctattttgtcatgcgattggacgttgaagtgatgctttgcccaagatgtcctcgagcagcgctcactggagcgagcatgacacagcgacaactggcgagttcaaggacgtgtattcattagtctgatgcgcctagtgctcgacgccccaggcgtagctcgcgaacgacatgtggcccatcccccacccgccgaagagcttctcggcctcgggtttgttctcctccatgcctgccccagcggcggcgacgaacggggggaagtggtctggcgtggggtgcgcgagtctcgcggcgggggcgctcggccagtcgacgatccgccctccgcgttggctgcagctcagtgaggactcggacgtgagcgtgttgtcgagccagccctggaacgccgcggcccacggcatgagcgggttagtgggctcgcggctcgcgcgcatgttgtgggtggcctggccccagcagaagatgagcgtgtcctcgtcgcggaaaggggcgatggccttgccgaggtcgacgtgcgcctggttgctcagccccgagttgatggacatggtgacgattgggatgtccgcgtcgggccggatcagcagcatcgggacgaagacgccgtagtcgaagccgcggtcgacgagctgggactggatgttgctcttctggagctgctccttcacctgtcgggcgaacgcggggtcgcccttgaccgggtagacgacgtcgtaggcctcgctcgggaagccgtagtagtcgtagactgtggtgtggtaattccactaaaatcctcctccaccaaaaggtattagagacaccaactacacgctaacccgcaaaggtaagcgcttattggatcaaaacctgaagaccaggaacgatcccttacaccgggtcggttacaagcgcctctgtgcaccttaggttatcttcggtcaacccaaaacctgtaccactagccacgagctaaggctaggatactatgtagcgctttcgcgcaaccccactgcagtccctcaggaaggaagggtaccggcgtgttaggccttatacagggggaccaaggtaaaacctcggtaggtagactaatacactcagggatactccaatcccacaaatatataccgaacgatactctaataccgttcctgcctctccggccacgccaactcttggcgctgccaaggaaactctcggtcaatgcacgataagctccccgacaggcatccacacgcagccgagcgtatccaggcactacaataagctagctacacttaccgaagtcggacttgacccatgttggctttgggggaagactgtctttttattactgagttttctgaggccctggggcctcgttctggtcatcctatgatgagtcctatgtccctatacaaatatctagtgtgaacggtcgcaataaggcgattccggacacatcaaatgacgaccgcggctacactaataagtgcggccgaagtacgtaactaaatgcatctgtacctaaaagtgggtaccatgaagcctcgttcggggttctattaggacccgacgaggcttcggccactgcctgtcactctaccgaggataatgtcatcatccaatcagaagcagccatctccgtctctcgcttgacatcgccttgatcgccccttgattgaacttgattgtcgggctggcgggtcaacagcgttggaaactgccactttccaataccacaactgcccccgcctcgacgcgagcctcccacgctggtgagcgtctaggcgtcctcagttcttcgactccatggctcctccgtcgcgtgcattcgccgacgcggctgccgctgctcttcgggctctccagtgctccggaccggtacgttcgtcgctcccgctgctcctcactgtcattcggatcctcgttgttgactccatctctttcttgatcatctcagggagctgttgatgtcgccaccgacacttcgggtcgtcgtccggcgcgccaagctcgttcggcgggtgccccgcccctatcgccactggtgctgtgcccccagccccggccgcgcctgcaggtgaccctacgctcattcctaccgcctccgggacctcggtcgaccctccaccggctcctccaagtagtcctgagtctgctgctggggcgaccgagactccctcgccggcagttcccagtgaagaggctcccgactcgccgccgacaccgccgccaagcgccagcgctccaccgtcgccaactcccgcgccatcggtcacgttggcaactcgcggggcgtcggtggggggcgaggcagctgtagggggtcgcgccggagctgatgctggcccggccgaggttcctccgacagcggtcgtcttgggcgagcagcagatgctggaactcgctcgtctcgtcgtgggtgttgcccgttcacctccagctcgagtcaacgctgctctcgaccacagcctgcaagctgctactaacgtcgatgaggtgctggctgctgccgttgctcctccgcgtctccctcttgcggaggctgatgaactggtggccctccgccgcgagaactaccggctgcaggcagacctctccgacgccaaagataaactcgctgaagagatgaacctgcggaccaagtcggactacttcctcgtctcggccaactccgagtgcgaccaagctctggacctcgtccaggccatgtgcgtccagctcagcaacgccagtgctcagttgatgcaagcgaacgcggccatcgctcaccacgctgacgtcactcagtcgttggagaagcggacgctcgttgctgaggccgctgctgtacgtcggaacacccagctccacgagcgtataagtgcaagcctcgttacctacaacactcagttggagaggcttcggaagcagttggccgaccgcgaccgagcaaacgtcatccccgcacgcattcaagcgttgacggacgagaacaacagcttgcggcgagcgaattctatccttcgtcggcactcggcagcacacggactcgacgtcgacaccttggtcctggcctcagccggcatctccgccgcagagattgattggaatcttctcgggctgtccccaccgacggtcactgtcgagcgtccacgccatgacgaatcctcgtcagaggagggagaggagtccaagacgaccgacgtgccgatggctgagtccaccgaggctacgtccgctcccgctgcttcggtgggcgcttctgctggttccccggtctccactgagtcgtcatcgcgcaagcggggtcggcaaaccgaggctgcttccgtcgggaatacggcatcgcagcctcctcctcacaaacgcttcggcagaccgtcagtcgacctgagggccagggctgcagcggccgccgcgccatctagtcctcgttcggcatcaggaaagatttccccgcctcctcggtcgatggtgcgtcctccaacgacggctcgctcaagctggttggagtgtcagcctctcccgtacgaacactcagacgtccccttgtatcctcggctggcacgtcgcgcctcgcctccctcgccagccccagcccagcagcaggaatcgtctggcgtggagtttggagggggtatgagtcctagcgacacttcacaagatgaccttgagcccggcgagattccgggggtgtcggctagcgctcagggtgttcaaggttctgctaccgagccttccggtactgtcatcgaggttccatccgaggtttcgccttcggcgacgacttccatcccttcgccagtctcgtctggtacagccggcgtcggccgtgcccctcgagaatcggctgctgaggtcaccgagggctctggcggcccgccagaccgttcacctggcggtgagtcgcctcatgagtccgagacttccgaggaccgcgcagcgttgttcctggagatgttcggccccgacgaaagagaggaaacctcggtggcgcaacctgtcgctccttcggaggctccttctcctctggctgccgcgaccggggttcctgtagcttcacgagccgccaccgtgccactcccgagtcgactcctcactcggtcggcctctgttcaagctcgggcgatggtaacagcaacggtgacagcttcaccgagggctggacctgcgtcgattgccccagcagtggttgacgcttccgacgtagctcctggatcgcgtaagctcagtggtcttgctaccctgttcttggagccgggtttcccggcacccggagcgtcggaatgctggcaactcatctaaaatgccagtgtccccctcgtcttcgaggacgacttggtcgcccccagttcagtggctggaatcgtggagtttggcttgtggacggatcttgctcacaccttccaagtgttgcgccagcttttcccagacgagccttgtttgatcgatacgacgggttttccatcctcggtggctatatcccgtcgtgcaactggtcgggctcttctcgttcgcctatggcggcagttccaggggtactcctaccactccaccgagaggggcgaccttggtttcgccttgtgggagcgtcgccactggattaggggtaaagctgtcaaggcgtatatcgacaacctcgccagcaccctcggtcagcgcaacgtgcaagtcctagcgcttcgacaagcgtggtccaagtaccactgagagcgcagttatcgtgcagatcgcttgcgagaccagatgctccacaaggtgtggaatggggccattacgtacgacggacaacctccacagcaccgcaccgaggttttgctggagccgtcgtacctgcaatgctcgttcgaggtgatggagtggatccccactaccgacgactgggcctccgaggtggcggacgtggatgcccgcgagccgtggcgtaactgttggttccaagcgccggcagaccacccctacaacacggctttcgccccttgcaacgacgtcccgttgtttgtccccaacggatcgactcgggaaaccgtggcgtcgtcggtcgtggtcgaatcttctctgcggacttcgatggtggtcgctccatggctggccgagttcgcaaacgtcaagtctgggcgtgttggctcaggctgtgatggagatttagcctcgtcaggccccgctccagcttcaccgtttcgttcacgttcttttccgatgtcgaccgaggtccgtggcgctttaggcgacgctgcatgtgctatcccaatccaaaataacgtcatgttgttcgttccatttcataatctgttctcgcgtcaacgcacatcgcattcaatactcggtcgcggtccccagagcttcttccctgccctcgaccgctgtggctgcctcaaacgaggcttggttcgtagctgcggcagccggacttcgtcttgtcaccctgcaagaagatcgggcttatgctcgttgaagaccgtacttgattcgcgggagaccgggcgtacttacgctagctccgttgcgggtatgatttcgcatgacagcccaattttgacaactgtacacccggtcttctgcgggtatccggtgtcgacagcttgcatacccatttcatcatcaactccatactcaaccacgaagtcgagcgcacttgttcgtgctacttccatggcaatcactgcgtcagaagcctcggtcgccctcccatttgcttcatcatcacttgtttcgtctgttgagggtttgaccgaggcttgcttgcgtcttccgttgtccctggctccattccgatatctccattccatcgtgactcgttcacttaacacataacatgcagattccagaaactttcttcgtctgtcactgcgagctggatagccctcgcaggcagttcaatcatcatctccagtagcctcgttcgtctgacatcgcgggctggattgcccccgcgagcagttcaatcctcgttggggcgcagaattactcctcgtcggccacctggaccatttgcaaacgtcggtcgcttcgcttccggcgtaggtaatcgtacaggtggccaccgcacgagagtttggacgctggttcccatgtcggctcgtcatagccgacccacttcaccttgagctctcggacggcccggtgagtactcgtcgacaacggtgtccggtcatcgaggatagcctcgacttcatactcgccgtccaggcggtccggctcaaaactatcttcaggcagtaattcctcgtcgaagtcaagacgagtgtcttcggtgacctcacgagccaaacgaaccctcggtcggccttcgaacccgtccactgacttgagtcgtgaaacatgtaccaccgggtagaaccggtatccacttcggtcgggtaattccaactcatacgcaaattcgtcgaccttcttcttcacgcggaacggtccgtgccaccgatgggctagtttcttggtcagtcctggtcgaacccgctccatgtacagccacactctgctcccgggctgcaaaggaaacctcgttctcgtcactgcagctctactatggtcaggggaactcggtgcccggtcgaccgaggttctattctcgttgacacctgccatggcttccttctccttcctgccaagcgacgcattgtgctcttcagctctccgagccttttccgcggcttggtactccttggctatcctcagggcgatttcctgctgtcggttgacctctcggcgccatgctagcgcgtcagtttggctaccgaagcctcgtttgagtgacgaggacattgccttgagcgtcgactgtgcatcccacccatgaacgaggtaaaacggagtttccttcctcgtcgtatcacgggagctattgatggcaaagattagtctttcggcgatctcgtcccaatcctgctgtagtgggtcttcagcgtatacgcggactaactgcatgatcgtcttcaccgatctctcctgctggccgttggcctgcgggcggtagcttagggtcgctctcgaccgagactgcatcatttccgcgaaggcttggaagacctcgctcataaatcgaggatctcggtcatgacggatcaagacggtgctccaaaacgtcggtagacacactcctcgaaagcttgcgcaacgagtaaggcggtagtgtcatacatggctttgcccatcacgaatcccgtgaacgagcattggaatagcaggagagccgtgttgccacggcgactcttcggtagcggtatcacgaagtccatagagactagttggaagggtctctcggctaggatgttccctggcgagtacccgcggaactgaggtcggctcttacttgaactgcagtcagggcacgacttaacgtgtttctccacatcggcatactgaccgatccagtaatagtctctcgccgctcgatgtagcgtacgggtaataccttgatgaccgccttcaagtgagtcagctttgcaggacctcttggatcatcgttgtgggcaccacgagtctcatcttcaactcggcttgctcgccgtcacttgaacgacggctcgttcttgtgtaatatagcacatcgtcctcgctcaacacaaattggtccgccattttccatgcatctcgtgctgctctgtatccaatcttcgcatcatctccccggagcactgccttcagattcgaccaccgtaactcttcatcttgagcggaggcgattctccttcggcgttcttcctgtactaccagcgggtcaatgtcttctgcgttcggtgggcctggtgacgtgtcggcacgcagcggtgaagcttctgcttcattctgagactcgttcggcacaccattggcttctactcggtgagatgcgtctccctgatcggtgaccgagacttcatctgcaaaccggacgtgtttctcctttgctctcgtttgacgtctggtcatcacagctacgtgtctggattcagtctcgttctgccgtctgcggtcggtttctcttcgcacaaaatcgaaaaaattcttgctacgaggtttggcagaagctaccacggcccatactgtgttggccgagggtatgtcctcgacgacgcaaccgtcagcagcctcgtaggtgacttcagcgatacggttcagcttcatcagctctaatactcggtcgtccgacgataccaccgtagactccttgcactcgagagtctcgtttgccagagagtcggccgcagcgttaaactctctcaccacatgcaggtacttcaccgaccgaagcttggccgtgagttctcggtggtggctgagttgttgcagcaatgactccttccgacaggctatcacccctagggcttgctggatcgcgagcctcgagtcgccaacgacaactagatcgtcggctccatgctgtaatgcagcagagacgccgttgttcatcccggtgtactcagcgaggttgaccgtggtgttctcgaggtaagcgctcgcagcaagcactactgtccactctggtagcttccatagtatccacgagcaactgccgtatccaccgttcttctcggccttcgcagacccgtcaaacgacataacgaagcctcggtaggaccgcggtaggcgtgcgtagagcagatgcgggtccaaacgagcagttggtgaccctcgtgtccggggtgtgaccaacgccagtgacttatccaagtcaacgaagttcgtcaagccggcttgaagtagctgagcaaacgaacagtcggtttctttgactcgttcgaccaacaggcgccacggcgacagcaagacggcgatctgggtagcccgaccgaacaatgtcttggacttgtggacccagtcgagtgtcgaaaaccgagtgtagacccggattcgctgtccaacgagttgagtataacacaccttcagtatcagcagaagcgcgaggacctctttcgcggccgggtgataattcatctcagcatccttcaaaacacgtccgcagaagcgaacggggtgtagtttgccctcgtgctcttgtatcaacgtggaacttagagcccactcgttggcgaacaacatgacatgcacctccttcttccggtggaagtgtcgtagtatcggtgctgccgaaaccttctgttggagcatcgcgaagctgtgcttggccgcggtgaggtcacccccggactggaagtcctcgtccttaagctggtacaacgctgctccatagaccgcgacgtcttggatgaagcgactgtaatagttgagtgccccaaggaaggactgcattcctttcctcgttgacgggaacggaagctcggccaccccagccagcttcttagcgtccggtcggataccttctgtcgagacttcgtgggacaggaagtctaccttggactgcacaaagatgctcttcgtgaagctgatactaatacggcactcttcaaaccgtgccagcaatcggcctagcgtcgccaagcacgactcaaaagtctcggcaccgaaacagatatcatccacgaatgagcggcgactgaatactggtgccaacaaggagtcatcgggctccccgttggcgaacatgtcggcgatagggctgttgaccagttcggctacagctcccttaccaagcgagttgtctcggtcggcctcgaacttggtccggaatggctttgccgtgccagtcgaaacctcgttcaccccagcatgagcttccttgtcaagttcttcagctagacgcatgcgctccgagaatttaaaccatcctcccgtcggttggacgaagccccaaagcgcgttgtcaatcatgcgttgatagatcatcggtgcgttcttcagaccgagaggcatacgcaaccattcgaagtgccccagcgcgcagacgaaagcagagatcttccgggctcgttcggtcaccataatggcccagaagccgctagcggcgtcaagcgagcaaaaccacaagtacgcctccatgtccgtcagcaagtcatccaccaggggcatggcgtactccataatctcggtgatcgcattaacgagtttgtagtcgatacacaggcggatatccaccccattcttcttcaggacgatgacgattggcgacgcccatgagctgtccgagaaggagataagaccggccttcagcagacccttcagcaattcgtacagcttaccgaggaagcgaagcggggtccgccgggccttctgcttgattggcgcgtgcccctgtacattgatgccacacacgaccccgtaggctggaggcggcagggcgttaccgctcgcaatcatgatcttctcgtggctcttcagcacatcgaccagggccgtctgctgcttcacgctgagttcgtcactctggacgttttgccccgagtagtccagcgtcgtctccaacgcttcggttaggtccggcaagaacgccagctcttgcgcgtagtcggtaagctcaatctcgttcgcgacgtgctccgaaacgtcgttcacggtgtcatcaccttcgccagacccttcttcaaccatggcatgcatgaccgagatataggtcggctccagtagctgctcggggtcgtcgatcgcacttagatctgaatcatggaattcagtgtcggcgtcagcggtggaggttccggcttcagtaggaacgtcgttaggccctgggtcgtgttcaccccagtcgacttcgctactacacaccgcagccgacgtttcctctggctccaggctggacgcagcggtccctgttggcaggacatcccatgtagttgtctcgaccgctactaccacgtcgcggtcatcctccgaaccgtcgttcgtcacgctgtcaccatcactcagctcatcactggcttccgatgcctcaaccgaggcgtatgtcgctccctggccggtggagtcaacaccactgttcggattcacgggcaggcaacccgctcggctaggcggcgagtctccgggtacgtccgagtcatacgacgcgctggcctcgtcgtccgaaccatcgttcgacccaccagcacgatccgcatcggttgtatcagctcgagcgacatcgaccgagccttcactgaccctggggtcgtcgtcgtagccatgtacatcgggtgacgagtactcatcatccaacggagcttgttgacggccttctggccatagcggtgcatccggtggcctcggcaggatctttcgcggcgtcgggtaagttcggcgctcgaccgcaggcggctgttcagccaaccattgctcgtagagacgacgttctcgtccttgcagagtctcatcacgactcgttgaataggccaacacctgccactctttgtacttgttagaatccaacctcgcgtagccggtctctcgcggtagttcaccatgcggtacccacagcactacggagtcatgcttggcgcgctgtgccgctgtggtcgtaatattagtgagccgtatccacatcggctgtccccgtcgaaacctcgctacggtcggcacaagcttgcccgtgcgtcgtacccacacatcgtacgccgaacgaggtagccgctggcgcggcagtcgaaactctcgccactcgcgaccgggtacgtataaatcctcgatcggcccacacgaaggctgcgtgccgtaaggttcgtcatcttcagcactctgcgactttagcagtggtaccatgacctcgtccggaaggcgtgcggtgccatgaaatagatccagccggattccagccgggatcatgaagtccatcccaaggaccacatccaccccggcactgtgatccattatccacatttcaaattcgtagacctgctcccacccgagggtgatcttgacgagcacccgtcgccgggtctccatcacccctgggttgatgccgcggacttcgagacttcgtccgtggtcccggacttctcgcacacgtagccgcttggcgaagctggcagcaatcacgctaacattcgctccagtgtcaaggagtatcctcgttcgcgcgtcgtccactgcgccattgaccaaagccctcattcccttcctcttgtcgtatcgttgggacgaccaccaacccagtctctcaccgggcagtaatttcaccgcccgaacgaggttccgaggtgccccccttatctgggctagccttgtgatcaaagcctcggtcgggtgtccatcacgttcatcatcatcatcttcatcaataccaatcgcaacgagacttgcgtcccggttctctccattttccgtcggtttcacacgttcattgttcttcaggtcgtcgtcaggccgtttgctttcgcccgtgaacgcggacagatagtccgcatcaacagcaggctcagctaactgtggcagcccgactgggaccaacccagtttcagttggcgggctgcctagtttaaatggcttccatacaccaggctttgcagctctggtgacagatccttcttgtcgaccttggacttcaggagcttggtgagctcgtggagtgattcacacttcccagcgccgtgcacctgttgcacagtactggcgtcgaccatctcgttcacggttggacgggcctcctccgttcctgaagcgtcggtaatcagaccgagcgaacgttccttcggctgcggccctgcgctcagcatcgttagcagcagcgacatgtccggtagacccatccgagtcgtaatcagcgtctgaatcctcgtccaagcgttggtcgtccgagtattggcgatcatcctcgaagtaatcctcgttcgcctcagcatcacgtcggggggcgtatggagcctcgttgcgtgcaccgaccgagcctccgacgttccattccgccatcacatcggccagcgcgtcaaccaaagtgactcgggactggtacggcgatccatcgcgtcggtcacggcgacggtcgtcttcactgcggtcgttgtcacggcgacgtcgttcgcgacggtcttcgtcgtggtagcgtcgttcgcggcggtagccaccacgagaatcctcgttcgacctcgcatcgcgtcgacgtccatcttgactccgagagcggcggaacgacgactctcggttcgatttgcggtcacggagacgcaggatgtcgttgatcatgtcttcgaggtcatggatgctcttgacccggacggggcacagacggtcttctaagtttcggtcctcacacgtgaccaagaagtggtccacgtggtccttcgcgtcacgaccaccgttttcaaattgcacaccggcgttgcgagcgtagccgttgatccggttgaggtagtcacaaacgtgttcctggtcttcccgcttggccgagtagtaccgagccttcgcagactgggaaaacttcgagcaatagtacttgatgaacgcctcgctcagcaacttccacgtgcgtcttgtcttgcgtgggcgctggcgacaccagtgcagggctccatccctgagcttaagttcgaacggcatacaccactcgttgggtggtgcacgcgttcccttcatctcatagatgaacgttcggagccactgcatggagtgctcgctcttgtcgcgcgttccgtagaacggcttgatgttggcgagaggcaaatgcgtggcgatctcgagctttggggttgagctctggttgtcggtcgcgcttagctcgcgcacctgacgtgtccatcgctcggtaggtccccttcgtagtagtcgggcccgaggtcgtcgtcgctgtccgacgaatcatcttggaggtcgtaacgtcggccggaccgacgaccggtcgctccgcgcgtgccaggcgtggcgaatgaagcctcgttctccctagccagacgttcacaacggtccttagatcgtggagttaccatgtgcgagtcttgcatgtacggcgaggcttcgcccttggttgcaaagacaccgtcatcagtggctcccttccgaggggtcgctggtagcgggaccgtcgacgggtctactgcctccgaggtcgaacgaagcatcgttgggcctcgcgaactgacgtccgccactccaaaggcattacgcagcttcttcctccacttggttaacgccgtggcagcggcggtcggcgtccaactcgcgagcgcagcctccgtggggaggatctggggttcgcaccccatagctcgcaggaggtccacagtattctgcgcaacgtgccgagtgctcgttgagttgatcggcgtagccaacgcccctccgaggtccatccagatggcctggcggacttgcttcggggagaacaactgcatccattcgctcttggtcttcatcaggtctaggcaccagcctaggaccttgttggccgccggagtatccccgttgtcgttgaggggaggacgagtgccaaccggctcggaggttgcccctcctaccgtcaccgagggtttgaagccctcggtggcaccgtcatccgcgtcgtaggcgggctcggggcccggcatgtccttgaacgtgtcggagaggtcgcgggtaatcgaccttgatcctccactgcggcatgccgacacaaccgcagcttcgaagtctcggacatcgctgtccggacatcccagtcatcatcttcgtcatcttctttggcgtccgacgaatcaatcgccgtgtcgtagctcaccgaacgctcgtcaatcgactccatccgatccgtcgttggggtcgagaatgagcttccggagcgcaccgaagtctcgttgcgcgttccactcgacttggtcggcgttgctggtaccgctgacttgactcccttcgccatcttctctcttcttcttcttctcctcttcactcgttgggggtaaagacctacaacaaccaagacacatagaaggtcacaccaatcccgggtcgcggcaccagctgtggtgtggtaattccactaaaatcctcctctaccaaaaggtattagagactccaacaacacgctaacccgcaaaggtaagcgcttatttgatgaaaacctgaagaccaggaacgatcccttacaccgggtcggttacaagcgcctctgtgcaccttaggttatcttcggtcaacccaaacctgtaccactagccacgagctaaggctaggatactatgtagcgctttcgcgcaaccccactgcagtccctcaggaaggaagggtaccggcgtgttaggccttatacaggggaaccaaggtaaaacctcggtaggtagactaatacactcagggaactcttatccgacaaatatatactgaacgatactctaataccgttcctgcctctccggccacgccaactcttggcgctgccgaggaaactctcggtcaatgcacgataagctccccgacaggcatccacacgcagccgagcgtatccaggcactacaataagctagctacacttaccgaagtcggacttgacccatgttggctttgggggaagactgtatttttattactgagttttctgaggccctggggcctcgttctggtcatcctatgatgagtcctatgtccctatacaaatatctagtgtgaacggtcgcaataaggcgattccggacacatcaaatgacgaccgcggctacactaataagtgcggccgaagtacgtaactaaatgcatctgtacctaaaagtgggtaccatgaagcctcgttcggggttctattaggacccgacgaggcttcggccactgcctgtcactctaccgaggataatgtcatcatccaatcagaagcagccatctccgtctctcgcttgacctcgccttgatcgccccttgattgaacttgattgtcgggctggcgggtcaacagcgttggaaactgccactttccaataccacaagatcatgtcggggctggcggcgctggagatctcgaagccgctgctgtcggactcccagtgcgcgaagatgaagaagattcgcttggggaggttctcgcccttggggtacagcttctcgaacgtggtggttagcgtgggcgcgggcaggctgctgttgctcatgccgacgaagcccgacgagagcagccacagcggaccgggtccgtgtgagacggcaacgactgggtggtggaaggtggtcatggccgtggtggattgggctttgcggtgttcgggacgaagggaattgaggaatgatcgactgcctcctcgccgtctcacttactcagctgttgacagtttgcgttaacttgtccttcggtagcgaagaaacgcgctcacagcgttatccgctgctcgtgttacaggtcaacgcaaatgtgacaggctccattagtgatcaaacctgcgttagcaggctccctgttttgagagcgacaaggcctcattctccaattctctagttgcagcgcacgcacgcacagccagccagccagctacacgcatcgcaccgaacccgaatcatgaacaagttccaccagcccgtggtcgccgtctctcatggcgctgggccgctctggctgctggacgaagggttcgtgggtctggacatgcactcccagtcggccaagaacgtggccgccatcttcaagaagatctactccagcgacgcccagttgcccaagcgcatcctgttcgtgtcggcgcattgggaggcgcgtagcaccggcatcgagatctccaagtccgctgcgcccgaaatgttctacgactacagcggattccccgccgagtcctacgagctcgtgtacggggcgaagggcgatcctgccttcgcctcgagagtgaaggagctgctgtctcagagcggcatcgcctccaagctcgtggaccgcccgttcgaccacggcacgttcgtgcccatgttcttgatgcggccgcacgccgacatccccatcgtcaccatgtccatcaacgaccgcatgctcaatgcaaaggaccacttcgagctgggcagggcgctcgcgccacttcgcgacgaggacactctgatcatcacctcgggccaagccacgcacaacatgtacgcggactggttcccggaagaccacccgatcgagccatgggcgatcgagttccagagctggctggaccaaacgctctcgacggcttccacccagacgtacaaggagcgcatggaggcgaccatcgcgtggaagaatgcaccgcacgcctcggtctgccaccgcacccccgatcacttcacgacatttgtggtgggggcaggtgccggcatggaagagaaccgccccgctgcgaagaagctcaacggtggatgggggctcggtcacatggcgtttgctaactacgcctggggtccacactcgtgaccacgctgcacgtaacactatcaaatgaaaatatcacggcaaactaatggaaaaatgcataaatcatagccttcaaagttttatctatcgaattcatagcagcaccgtgacgttcaaacgccacagatccgaccactagaacgtcgaagggaacaccaacctcgccgtatccttcaccgtgtggccgtgtacctcatacacgtggacattcttaaatcgggtacgcagcaacttgatcatcacaatagcccacaagtctttcgagctcaccagatacttctcgttcacgatcacatatccagagcaatagaccccgtccgccgacgcgaacttcattcctttgaagaagacgtagttgctgtagtcggagatgagtccgaagcgcgtctgcagcatggatccagtcgagatctcgaagttggtgacgattcccctctgggtcatggcactgcgctcgtttgccgatgagtttgcggacgtgtccgtgccaatactcgatctctgtcgaacttgatccggccggaagaagcggtaaatcttgcgtaggatcgcaaacactgtgatggagcacatgaggaagagcatgggcgtgaaggacgcggcgaggaacttggcgtccttttcggggaactcgaacgacgaccacagccgcagtggggacatgtcggtaatgactggaattggctttgcgatgccgactttgtactggacactgaaggtggttgtgatttcgttgaccacggctgaagaagcctggatcagcgcctgccggtgctcgtacacgacttcgaacaaaaagatggcccctgacaggtcgattcgctcttggaacacggagctcagaaaactcgccaagcaaaagtacacaaccagcaggtctgcgtgcatcatttccgggtggacgcagatcgtttgagcgctggcaagcgttgcagccctcgacatggcgaactcgttgacgggccagaaggagtcgataatccaagagaagaacaccaaaatgccgcgcatgacgagagtcgtcgttgaggtgtaggcgaatgggtccccgatccagatcttgcccgaccgaatcttctggtacattacgaggaacaagaccaccaacgagtaggtcatctgcagtccgaaaaagaagtgaaaacagtgcacccaggtccaggagtcgaccatgacggcttctccgatccattcccagcgagtcaaagccttggtggcacttaccccgtcaagtagcgagtacatcgtgcgaacattgcactgcgtgtcgccgttgtagaacccgcgcttccgagctgtcagcaggtgcttgaccggctccgtctcggggttctggggaatgctcgttagagacaagtagctctcatccgtgacgcccacaagttcgtacatctcgaagtttgcggtccgctggtacgggtacgtgagcgctgccatgtagtactgcgtcacgttggtgtcttgcatgtcgtcgatgacggtgagcatgcccagcaacgcgggaccctgcttattgtgcgcgcgtacttcgtactcttgcactgagagcgacactgtgatcaagtgcaggtcggtcgagtcgaaacgcgagcgtacgaagttgtagactcgggcttgagacgtatcgcctgacttgatctggctgaaggaacagtcgacgatagtgaccacgagctcgaactcctcgagggcggtgatagtgtacttggtgtcggagaccatgtccaggtacgcagggttcaggaagtcgtacccgtacatcgccgagttgaaaagtggcaacgcggagcaaccctcagtggaagtctgctcagcagtctcgaggtataggacgttgtcacggggcgtggtgtcacctcccagtacgtcctgcaccaacggactgtccttgatcaagccgtcgcccatgtagcctttgatgagcgacgacgtgaacactcgaagaatttcggtcgggttgtgcgctccgctcagcacttgtaactgtggtgtagggaacatcaagttttgtgtcacactccaaggccgcagtggaacaacgtaccaggagccaagttctactcggcgggatgaccgtccgccgagctcagtgggctgatggaccgctgaactcggctgatggtgtcagaaactcaaggcacaccggccccgacctggtgacacgtggtaggcccagtgatgaagacccagccgagttcaggaaggcactggacacgctcagccgaggtcatggggagttcaagccgccgagctcggctaaacggcaccacgtaccatccagatacgataaccgggtccaattgagtccgggagtcgcccagtcgagtccaagggtcgctccgacgagttcgccgtgttatctggacaccttatccggctccgccgagttcactgggttatccggacatcttattcggctcagccgagttcgccaggttatccggacacgccgtatcgggctcagccgagttcaaggggttatccggacaggttatccggcttagccgagctcaagcgtcgccgagctcggtgaagagtcggccgagatccaaaaccgcccactttcatttggtatttgtataggagcttaggaatagtggaggcgccccttcagggcgcccgacagagataacaaacaacagcgcagaattttctaggtccacaacacgtgcacgcgcttccagtaagcccctgcacgggccggattatgtctgctgtcagcacccgagaggcatagcttgtagggtgttgactggtagcgccaagagattaaggtcggcccgggttgggcgcgtgtctcgccaagcgcgaaggaaaagtctcgccaccgctgcgcgccggtgttcccgtacgtcccgggcactgattgctgagtcgagaagcctttgctctcggcgacccgtaaaagcccgcgagagccgtcgtccgtcctttggcggagggcacgggatttctaattccggagtcaggtaactcagctggcttccgtgattgactggcttggggtacttggtctcggcgaggacgagacatcactgtcccggaagggccgaaccgctgggggacatctcagcgcaggccaacacggctgttgttgtgtttgtagctagggcgccccatctgacgattttgtgcgtgctactacaccacacaacgaccaccacgtggccgtcatggagaagtacacgtagaggccagcagaggcgatggcggtgagtcggcgtagtaggttgaagtactgccacttccactcgcgctttttgcccctgaagtgcacagtgatgaactcgccatcgtgagtgagcgctgtcgaatccacggagatgcccctcgccctctccttcttcaccggctcctcgcgtgtctttaccatccacgcgcttggtgctctttacccccgaactaattcgatgagtacttcgggtcgaaatgaaactggttgcaaccaacttcaacgcattaaagcactcaggttggctttccctatttgcagcgatcttcgtcatgactggataagattcacttgaagcgctgatcgagttcgtaggaacgtcaccaaggttaaggtaagaatagagctgaagcgaagcagaacagtgctcttcggccttgatgtattttcgtcggatggcgcaacagctgcaacccgcctgcaaagaacctgtgctaataagcattgcaatgtcggccgatggagccacgcgcccgccggagattcccattcaggtacgcttctaagaccacggcgtctgctccttataaggcaacggacaacatacggggcataatgtgtcttggtagtcgtttctatcccagtctccacttcgaactcacgttttaaggcgaagtgccgcaaccgagaagacactggaagaaaaatgctttaaggttaactgtaagtcagggttcgctaactctatctgcgccataactcgaattcatagcagtaccgtgacgttcaaacgccacagatccgaccacaagaacgtcgaagggaacaccaacctcgccgtatccttcaccgtgtggccgtgtacctcatacacgtggacattcttaaatcgggtacgcagcaacttgatcatcacaatagcccacaagtctttcgagctcaccagatacttctcgttcacgatcacatatccagagcaatagaccccgtccgccgacgcgaacttcattcctttgaagaagacgtagttgctgtagtcggagatgagtccgaagcgcgtctgcagcatggatccagtcgagatctcgaagttggtgacgattcccctctgggtcatggcactgcgctcgtttgccgatgagtttgcggacgtgtccgtgccaatactcgatctctgtcgaacttgatccggccggaagaagcggtaaatcttgcgtaggatcgcaaacactgtgatggagcacatgaggaagagcatgggcgtgaaggacgcggcgaggaacttggcgtccttttcggggaactcgaacgacgaccacagccgcagtggggacatatcggccagtagtggggttaccgttgcaatgccaatgttgtattgggcttccgagtaggtgaccacctcttccaccactgctgacgacaggcgaacgatcttctgacggttctggtggaccatctcgaacaaaaaggtggcgaaagagggatcaatgcgctctcggaacacggagctcaggaaagccaccaagccaaggtacacggcgaaaaggtcggcgtgcatcagctccttgtggacgcgtacaggcgatgaacccgagatcatcgcggctctcgacatggcgaactcgttgatcgaccagaaggaatcgatcgcccaagagagcagcaccagaatgccgcgcataacgagcgtcgccgtcgaaatggacgcgaacggatctccaagccagatcttgcccgaccgaatcttctggtacgtgacgaggagcagcaccaccagggaataaattacctgcagcccgaagaagaaatggatgcagtgcacccaggcccacgagtcgattgtcacggcttcaccgatccattcccaacgagtcaacgcgttcgtggcgttcacaccgtccaggatggagtacatcgtgcggacattggactgggtgcctccattgtagaacccgcgcttccgcgctgtaagcaagtgcttgaccggctcagtgtctgggtcccgcggaatgctcgtcaaggataaataactttcattcgtgacgccaaccacttcgtacatttcgaagtccggagcccgctggtacgggtaggtgagcgcgaccatgtagtactgcgccacgttcgtgtcttgcatactctggacgagagtgagcatgcccactactgctggcccttccttgttgtggtcgcgttgttcgtattcctgcacggagagcgacagagtcatcaagtacaagtcgctgggatcactccacgagtgcaccaggttgtacacgcgcacgtccgacggatcgccagccttgagctggctgaaggagcaatcggcgatgataaccacgagctccaagtctgcgagggcggtggcgttgtacttggtactggagaccatcccctgatagcccggactcagaaagtcgtagctgtaaatctccgaattgaagagcggtagtcctgagcagccgtcggtcgaggtgtttgtactggactcgaggaagagcatgtagtcgcggggcgtggtgtcgcctcccagtacgtcctgcaccaacggactgtccttgatcaagccatcgcccatgtagcctttgatgagcgacgacgtgaacactcgaagcgtctcggtggggttatgcgctccgctcagcacttggatcgcccaccaggacgcggtcatggacgcgtacacgtaaatgcaggccgagacgatggctcccagccgacgcgagaggttgaagaactgccacttccactcgtgctttttgctcttgaggtgcacagcgatgaactcgccctcgtgggtgactgcggttgagtccaccgagctcgctctcggccccctcttccctcctggaagcagcacgtgcgtcttcgtcatgaacactcgcagtacagtggtcaaacctctgctctgtctaagctgcactgattatcagtcacttggaagtcgaaatgaaaactggttgaaggaagtatgctaagattggtcgttgctcgaggaactccctccagaactgagaatgaagcagtggggtattgattgcgtggtgggcaaaggtaagaatagctggagatgttgatcgcaagatatcctcaggaactactaaaatcagccctcaggaactaccaaaataaaaatacccgtaactgtgtgcgagtccagcgccgcaacgatgaaaagtgcaaccatgctgcccctcacaataacttccgcgtagtacacgctccaggagattctcatgccaatagactctgatccggaaaacgcaaccttagtgtaagccaggttgtcgccaacgagctgtggatctgtacggacaacacccagcaccagcagcacccaccagttgagcgttaaagagcccccagccagtaagtagccccagcagcgaccgcacaacgcacgaggcctcgcgtctcaattgatctcagcgaagatcggctacaacatggctacaaaagccttacgaccgccggaaaacctgtgcttccccatatgccaaaccacaggatcgctaaatcgtacttcttattcgtaaatcgtgccaacgtcacaacaaaacagcgcatggaacaccaaggtggcggccgcgcggccgcgggccccagcgcgtcccagcagccggcgaccgagtccgagtccgcgcctgcgtccgccgctgcagatccgcgcctctccgagctctcgcggctctttatcgtgtgcggacgcgaccgcaaagtggacgagctgcgcgcgctcttttcgacgtgcggcgccatcaaacacctgcatttggcgctcgaccgaagcaaaaaatcacgcgtacgcaattgttttaactttttacttgctttcactatgctgtctccactgtttctgatatgttaaaaacgctcaaacggacgatagggtttcgccttcttgcagtatgaggacccggccaacgcggccgccgccatcgagaagctggaccacatgaagctcgaggacggccacatactcaaggtgctggggcaagaggagtctttggttcgaaggtgaattaagcggggcaaaatctgactcgtggttttaccgtgttttaacgctttttccaggtgacggtggccaaggagagacctgtgggcggcaatggcaaattgaagcgcgaccagcacgcgcgacaggatctggatgggaaagcggagggcggactcagagaagacgacggggggatcgaggctcgactgccgggcaagcgacagcgctcaagtccgccagttgctgctcagcccttgggctccagcagagtttcgccggcgtatctgctggacaagcatcgactggagggtttcgtggctgctactgctatccacaccgctgcgaagactgcgaagaaagaggaggtggtggtgtcaaagcagccctccactgctggtaatgtcagggacgagtcgatggacccggatgcagaccggaagcaagtggagcaggtaatgagcggcatgctgacggtggtggagcaaggggcacggaccaagtcgggtgataacctttttgttgcgtaccagcgtgtgatggcaactccgagccgtggcaacaagaaaaagcgtggcggtggcaatttgtcgattgtggtgccgggatctgaggacgagctggaggaggaaaactgcacagactcactggcctccagcatccgctccgtgacgctggcttcgactccgatgacagttcgaggatctcctcccgattccctgtggacacctagagtgtcgacgagagagagccgggccgtgcctcctccgcgctcgaagcaccaattgcgcaggcgacgtcagagtctagatggcagcggttccagcactgaggatgggtctgatgctagcggtatccgccgcaaacgaagcaacacaaccacgtcgcctccgccgacgctgaaagcgcagtcccgcggcaacatcccgccgttgtccccgcctcgtaaaatctccgatcgaagtgacatcagtttgtcgccggaggcgctgaaggcagagataatatccaaaaagctttgcaaacggcagtcttcggacaacacgctggaagagtcgtatcgagtagcgaagcatcaggcaactcacgagagacacacccaagacagcaacgcgatagaacgaggatctgctcgacccagtagcgccggtgtagatagcagctacgagaaacaccggagcataaagctcgagttcaaatcggagactcctgagccggcacgaacgaagcttttcttcacgtcgacatacaaggtgcgatcccggtatccgacctattcgggctccaagcttctttaacacttcgcttgttttacagttcaccgagcaggagctcgaggcaatgtttgccgtctacggcgattttgagtccgtggagctcgtcaaaagcttcggtcgtgtgagaacgatggcctacgtcaggtatacaaaggtaaggttgtggtgcagagcctgtcgattagttcagtatctgacatgcaagccttggaccctgcttgtctctcgcagtcttcaactgcagcccttgtcgtcaaatcatttagcgaggaatcgtcccaaggagatgaaagtcctgagaaaactgagttcatgacggtgcgtcgaccatctatcgagcggtacaagctggtattcgtagttctaacgcgtatgtgccatccagttatccttcgcgcacgacacgggagggcatcaactgcaacagcgagataaattgacaaacttccatgctgaaagtggcctgggctctggtggcatgagttgccgtctcccgcacgaaaatgcgccagcgtcaattacaacgacagcgacttctgatggtcgaaaagagcggctttgggtgctactgctgtacgatcggtttttggcgacgcacatgctttcgtcggttgtgtcgtcattctcgggaatggagttcatggatatcaaagttgtaaagagcacgggtgaggcacagggcgtggcgttcgtgaaatttgactgcgagacaaacgctgcccaggcagcgctgcagcttcaccaaatggagctgcccctcggctctggcaagtttctacaagcgattgtcattttggcgccaagtctgttcactaccacgcacggcggcaattcaatcggcaccaacgactccatgcgtctggatcactcgtccagtgaacgtgtcgtgacggggtgctcggaagatgtcgacttgcgtgcagtggaggcgcgtttcgcgcacctgatgcgaagcacggagcactcaagggaagggggttatttcccgcagtactcgatgacttcgcccagagaagtcgtaccaaacgacagctacccaccgtctcactcagccgggtttcatacttccatgggaatgtcggcgggggtcgagtactacccgatgcagcttgtgccgtatcctccagccccccagcaacctttccagccgtatgcaaactatggaggcccagcgaactaccaacaggtgccacagcatcaaagtttcggaggaagtgcgcctgggtggatgagtgcaccacagccaccgtactatcaaggaggagccccgcagtatccgttctcgtgcgcgccagagcaagaaatggcgttccctgtcgtcgataacagtagcagcgtaccattaaataatggcgacgcgtatgctgttcccccgaagcctcgctcagcacgctcatcgtcggagcaaatggacatcgaggacggcgccagcagctgcagcagccaagcttcctcctctattcacgtttcgaccagcgaaccgctagagctggtgactttggtcaatgccctccaagagtgtccaggagtagtgtcatttacgaaagacgccagcgccgcggctgacttgactgggtacatggtggacttcgccaacgaggctcaggcgcttgacgcagttcgtaagttggatggatcgctgtgtgggggacagacacttcgggttgcgaagtcaacatcgacaaggcaacgaggagctggaggtggaggtaaagctcgctcgggatctgggcgtcgaaagcgacagcgtgttgatccaaggagccgaaaatgaaatagagaatgatacgggattttgagagacaaacgacacaaccagctcatgaattacgcattgttacagcattccgcgtttgatagcggcctcacctacaagaagtcccggccggggaatacggcaggcgctacgagggtccaaaggaatagtccagacgccacccattgtgagatcgccttgacccacatagtcacaacttcatcatcgttcgacgacgacctgacaatgccaaccatgtacgtaagttttcagcggtagccaagttcaacaacgaaaatcctcccttacccgtcgaagcttccccagttcgtgagaaccatcgccatgtaaagcgatgccagcaccatcagcacgtggaactggtactctggcaccacttccacctcacgctgcgcttccttcgccaaccgcgaagacgtcagcccgatactcgcgagttcctcgtcatcttcatctccagcattttcaggatgcttttgagcagaagacgacccgaaaaacgaggtgctggtcgccgacgttcgccagcttgtccaggtgatagtgaacgctgcaaccaaagtgttcgtgataactcctgattgctcctgctgcttctcttcagtggtgaaatgcaacggcgcgcaggcggcacttgggttcgctcgaactgtctggtagcacaagaacacgaggtaaagggagactgcagttgacggcaggagacccatgtttacccacgtcacgactgcataatacgcaacatcagagagctggaactttactcaacaagacagacagtagcgtaccgctcaacgcagtcaggatgatgactgataacagcgtaattgagatgaacatgacgttcagctcacactcggcataccgcgagtacacgagggcgagtcccgcgattgacagcgccatacagacgaacaccagcgcaaggtacgccccctccctggacattggaacaaatcaaaatattagatgagactcagcgcgcgagtcgagttgacattctacacggagctcaccacatggtcttggttccgtcgccttgcgtcgagtcaaagctgctgcccagcagagcatggcgcgcatcgtcgtcgcggtcagcctcgtccatcttgtccaagatgtagtcccgcagactgtctgcaacagccagcacaaccaggtcagcaacaggaggtagtaatatagtgtaacttcaccgccaactcgatcctacacgtcgagtccaggatgatgatgatctgcaggatgatgaagagtgccgacgccacgcgcgcgatgtccacgtatccatcgaagaaatctattacccccgcgcactcacaacacattagccctgtacagtgcttccatctgctctactcccacagaggtggcctaccattggggatgaaaagcgacgccagcgccatgccagcgtagagcggcagctggaacagcagcatgcagcagacactctcgcagcctctggccacggcgcagctcagcagcgccgtgagcgtgaagaagcagcccaggctgaagctgatgcggtagaccaactggttgcccatgcatgtgctcgggtacgccgagtcgtcgcactcgtcgaagacgccgagcctcgacagcacgtctgcagcaacagagcaggcgggcaggtgtcagccacactcgaacaggtatacaagagcagatggacgatgtatactctggccgaaggtgcgcagcaggcctgcggccgcagcgctcacgaagaagagcgcgacgtagccgactcgggccatgatggttgttggaagagttctgaaaaatgagtagcgtatcaaagtctcggttttgattaagtatacaatgattttgcgttttacactgcaaagggtattgtgagtccatttcgactaagtagcacttcaacttcgctgcctgtcactggtagagctgcatctgcgtgggcggcacgatgaggtcctcgttgatgggggcggccaggtactgcttgagcaggttcttgagctctgcgttctgggttttcatggccgtcacctcgtcgatcagctccttgcgacgcagcagcgccgtgttgtagtgcgtcagccccttctcgagcgtggccataacgcggatcttctgcgccgggaacaccttgacgatgttggtccagtattccttctccgcccttccgggccctggccttgagcgcagccgagctggtgccttttgtcgccttcttgccgccctccgtgtcgccgctgactgagcggtgcaggatccgagcaacaggagcagcccgcttctgcgcattcgtctcctgtaaatgtacgcaagcccaaacgattagttcaacacagagcagagcagatagcagcaatgttcacggcgacggacctcaacgaactgcttgatgactcggatgacgtcctccgggccgacgacaaggccccacgatgacttggccccgtccttgccgggtgaactgccctcccggttgttgtcgccgccaacaggaacctcctgtcgcggatcctcgaagaagtagcccatgagcttctccatgtcctcctcgttgtcgatcccgagcgcgcgcatgatcatgtccgccttcacaagctccgcctcgtcatccggtaaattttccagcgcttgctgcacgctgccgttcaccaggaacccagcctcggacgcgagcatcttcagcatgtacttcagcttcgcgcccgatattttcttgactggaggcgtgtaggcctcgaccgattcgtcgtcgaaatcgtcctggtcggcgttcaaattgtcgtctcgcctgctgccgcccttgtcgctctcgttggaatcgggcgacgactcgtctccgttctcgagctgcttctggagagctgccacatcaccagcctttgcagactgactccagttacggatggactgcgccggtggccgccacgtgagaccaagctgctgctcgtggatgatgcgatctgcgtccagcagcttttcgatcttatgaatcgcgtcttcttcgtgcatctgccacacctcgtcgaacttgttgctgtcgctggattcgaagtgcgcgtacttcctctgcagatcgcggtactgcttcgtgaggcgccgatattcctccgtgagctcctcgttttggtgtcgatctcgggcgtcagtctggttgtacttggcgatcagagtggccagcgcgtctttcagtcgagccaacttccgcttctgctgactgagcgtcgccgagttctccatatcgcgctccgtcagtactcggtagttgtattcgagcttctctgtgttgagctggtacgtggcgcgcatctcttcaagctgctgctcgagcgtctggatgttggtctcgagcttaatcttgagctcgttgtagtcctctgcatcgcgcactcgtagctcctcgatctcctgcagatactgctcgtcgcgcgtctgcttggtctccatgtagaccatctccatctcgcgcctgcgctcgaacagcgagtcgatctcgagcttgttgttggcgatgagctcgtctcgctccttgaggaaggcgtcttccatctgctcgagctcgagctcgtactcgtcctgcatctcgcggtactgctggctcatccggtccacgagcttctccacctcttccgcttgaaccttgagcgccgtcacgtactcttcgtccttggccttgagctggttctggaactcgcggatcaccgcgtccttggacgccaagatctcggcgcacgcccggttctgcagctccagctcgttgtgcagctcctgcggcatgctgaactcgaagagatcggcccagcgcatctccacggcggcgttcttggcgccgctgtcgatggcctcctgctggagcttctgcacgcgccggtggcgccgctcctcctcctcgacgcggcggcggttctcggcgtcgtccgcctccacgcgcacgctcgtgacgtggcggatgcccgcgagcttgcggcagtccagctggttgaggctgtcggccacctgctgctggccgcggctcatgcgctgcgactcgcccacctgcagctgcttcttgcgcgaggcgtcatccttggacgcgttgcgtgcctcgatgcgctggcgccgcacgttcatgcgcgcctcgcggtcgctcgcctcggtcgccgggtccgcgtgcgccttggatgaggacgcggacgtcgagtccatcgtcatggcggccgcgcgatggtagtttatcagcagcgcggcggttgcaacaacggcaacaagaccatcacttcaacatgagataattcatgatgtcaggtttatcgtccacgataggatatgcatttacatgagtttattgtgatcataaactcaacacattttccagcccagcatggacgagcaggccgccactaccgccaccgccgccgccgcgccgccgagggcccaggcgaccaagaatgggcagcagatgctggcgcacttgctatccatcgcgtaccacgtgctggacgagaccaagcacatgaacctgaagccgccgctgcgcccgagctccaagctgttcgccgccgacgcgcccagctcgccgccgcgttctcccgctgaggccgacgcgccgcaggacgaggcgctgccggacgtcaacgggcttgctgcgggatttgccggcagccacgcgcacgcaggcggcgcccagggccaccccatcgtgatcccgtactcgcccgaggagatccaagacacgtactcgaagattgcggcgctcaaagcccagtacatcaagatcagcgccgagctgctggaggccgtgaaggaggtggagaagaagcaggagccgcagcaggacgacaaggtacaaaaagggttgcatgttgtgtggagtgggagggtctgacctgacgtaacctgttgctgttggtggtggtgccacaggacgcgacggcgaagctcgtgcaaaggaggaatcagctgcgcaaggtgcggacacgctattatcggtgtgtggaaattatggtggctatgggttctgatgcttcttgtgctgttgtggtgagcaggaggtttatgagaggaacttggtcatgaaggggctgatcgaccggctgcgtaacctgcagcactcgatcaggctgatgaagggagggagcgcgtacccgcctaacatcgtcatggagagcgtctagattcgtagcgtctgctgctgtgaatgattttcttcttcaagttaaagtttttcgcgcagaactcagctctgaccgcagcacagtatgtattgctacaaggttctacttgcatttcgtcggcaaatgcacgttcagccgtacacggcaggctgccgcttgccggtaatctctaacttggttagctcgcgctgcagtgactgctgagaacttctcagctcctgggcgtacgctacgagctgtgtcacggcgtgttgtaatacgccgttgtcatgctcgaggccttctgcacgcgtttgggactccaacgccgagctttggcaagaatccaagcagctttccagctcgttgcattgctgtaacagactgcatcattgtcaacaaagcagaagtgagtgaatcggtacaccaagcatagcaaaaggatgcagcgtactccgtgcgttggcagcgctcgatcaccaagtcacgcttgagattccagttcgctgacatcgcctgctcctttcgcttctcactgctacggaaagcgctcaccacggattgaagctgatccgtgcaaagtgttagtcagattgtgctcctctgggtttcgcttcaatttacaggtagctctcgtacctgttttctggcagcaactactccagcttgcagctctctattgcgtttgccatattctcgcaatgctcgccctagtgaaacttcgctaaagagcagaataaaccaaggtgttagtcacaaattcatcagcaatcggtgatctaggtgcactaaccgactgcgactcgccaccatttgcttgcttatcccctccagctcgaagcagaaccttgttagcgtgtcttggagaagtgccagtcgcttcttggtcggaatgagcactgaaacaagctcgcgctcggatagttctatcgcttgggcgtgccggctcagtacacggtaagcatgagcaagctccgcatacttttgaccacgtttcagtagcatttgatctcgtcctgcgagcttgagcttcatctgaagcatgtcttcggcgagcagctgcgacgtctcggacaattctcgtacctgttcgtcgagtttgtgactccttgcttgctcgcactgcagctgatactgcagcgaaatgttgttcttcaataagtgctgagcatgcatttgatcttcagcacgctcaacggcagaagctcgctgtgcgagagcctgctcctcttcgaggcgctggatgtactggttctgctgctcaattgttccagcttgttgctccaactgcacggtctgctgctggacggtagattctagctcattgacacgctgctgcagtgtctgtctctgtttgccgagttcgctccactcggaatcgtgttgtcgtttcgcagtcaactcttgctgaatggcctcaagtttgctcttcagagcgttcttttcgctctgaagcgctcggacttccgctgtctgtcgagacgcttccagttgagctcggttaagctccttctgaagctcctctttggcagcttcagctgcttgcaacgcattgctgcgcacacggatctgcccctgcagctcggcttcaagctctttcccctggctcaactccgctttcacaccgtcgttctggatgagagcctgcgcggccttttcgaccgcattgtccactgcctcctgcgagacagcgagcttttgtgtgaatagcgcgcgctgcgtctccatctccgcccgcgcattcgccacggcgtctcggagacgcgccgccgtcttttgtccctcgctgcactgcgcgcgcgccttctggagcctggcgtctttccgggccagcgccgctcgcaagcgctccatcttctcgcagatctgagcgtaccgcttgctgtccatgggcagggtgtccctcgtggacaggacggagaaggccagcgacgacacgctgctcgcgatgctggcgtcgctgccgcgtctcgacgcagagcagcgcagcggcgacagagcgccctcgtggcccgaggctgcggctgcctccagctcctgccgcagtagctcgatctcctgctgctggcgctcgatgacgctgagccactcggccccgagctcctgctgcccgtccggcggcatcatggctaacgttagtgttgccgtggctcctcgcgcttcaacatggcggttattggctgaaaagcggttgcaagacaatctattttgtccaatgacatcatcatcagacgcccaacattcgcgaagaagcggagggttggcgacgtgtacgagcaggaggagccggcggtggacgcgcagcaggcggcgggggcgccgtccgcggccggcatcgtggcagaggacgacgacgacgacgagatcctcgcgctggccggcaacccggacgacctggactcgcagcatcagcagtcgccgcagcagcagcaccaggagtacaccaaccagcagcgatgaaccctgctggcgtgaacgctcttgctccttcttctgctcgagctgcaagagttcctcgtctccgtcgatgtcgcgctcgatgtccacgggacgcttggcatcctcctcctggaggatgtagacactcctgctcgaccttgagggccgcttggcactccattagccgccgccgacatgggcttcttctcgtcgtccttcttggcgtcggcattgggtttttcttgcccttcttcttcttcttcttcttcttcttcttcttcttcttcttcttcttgccgtccttcttctcgcctctagcagcgggggccaggtacgcggcggaggcggctggcggtttgttctccgtattgttgctcgcctccacctgcagctactgctcctgcatgttggcgccctcgttgggcgcgagctcgttcaacaagtcatcaaggtcgtccaaggcgaaggccgcttctggctctgaggctgaggccaagacaaaagctgatccgagtaaaccaggtgcaatttcaatcagaacagaacctggtagcgcagtggagctgtgccttcaagcctgaccgaatatcgagacactcggagcaagtggtgttgtctcgcatccagaggttggccgacacttcctcgcagaagagctccacgaacgccaagaaggcgagcgcgacgagctggaagaagccgtcgtcccgctcaaagagctggcggtggctaccgtcaggacagctcgggcactcaaggaggctcaggcggacggacgatcggaccgataccgtccgtactaagcacccgcgacacgagaaagcgaaggcagagaaccgattcgagccgcgcaaccgcaaaatggacgtgcgcgcgatccggcacactttgttcccaccccagctacgatgtgctggtttcccctcccccgacttcctcggctcgccttctccagctcgtacctgttgctatgaaatcgatacttttttcaccctgccgccgtgttattcgtactactcgctgtcgctactgaacgccgtgtttcgggatcatctgtagtcgtcatttgctaaccaactaattaaccgcaactcgtgcaacgacaacgttgacaccgcgaggtctgacattgctcgagtaagctcggttcttcgatcggtgctcgggttcgacagcactgaagttgaagtagcatcaacaacagaccggccgtcgagacccttgaatcgaaactgcagtactgcaacgagctcttctggagtgcccaccgatctgagagactccgagactcgagattggcttcggagctgctggagtatatccgcgaagttttccatgtgaggacccgttagcacctggcacctgcaagcacatccgtcagccactaggtttggaatgcaagctgaaactcgctattgaccagcacacgcaccccgctcgcaacggctcgattgggttgtgaccgcctcgctccacaaaagttcctgcgagaagattcaatgagtgctaaaggcacaagcacaaagcaatccgctcaagctcttgagtccctacctccaataactgcagttgaaatcgcgtcgtaaagcaagtttgtttcgccctgtaatggatatcacacatcgaagagatcgtgaatcggggcggtacttcacgctacggcagccaacacgtcaatctgcttaccatcgtatccacaaagaaaagatcgaccgagttcgagggaagtccatcgcgcgagcgcacaccgaccaaaagctcggggaactaagagggccacatcaacatttcttagaccggttcaagtttctaacagctcatggatacgcaaggatatacctggttctgaagctgcttcacgatggcaggtgtccgcgtaggatgccgcggaataatgaccgtaaggaggtgctggtcgtggtctagacgcttcgagagagctgcgtgaactccagccatcatcatctcctcgccgtcgtgagtactagccgctacccacgctggtctcgagccaattgcgcgccaccaagtcgaaacctccgtttcgttgctgatcaaatgcggagaggcttcgcgtccgagcagtaaacaacagcaacaacatgagtcgcgagtgaacattggctagctaggaggcgaccgagacctcataccaaatttgagattcaacgctgtgcgggcgtcccgagctcccagaaactcgaagcgctgccggttctacaaaagcaagatgtcggtgagtgtcggatctgcagagtgatcggacagctagacgcacctgttcgtcttggcaaagtaccaaagagaacaatcccaccacacgttttgaaagctcaagcagacccggcaaccgccacaaccggaatgactccggcgacattcgaccgttgatcaggccaatgcggacccctcgtcgctttgcttccatgatgagcgtcggccaaagctctgattcgatccagatccctgcactgcacgcccgcagcatcagtacaacgagcacttgaagaaataaaggagcacaatcagcagggagacgtcgtactctggttgccacgcgtcgtagaagcgctccacgcaccgcgggtggtccagcggtgccaagacacacaccgcgcccttgttctagcgatataccagccaatgcagcacacaaaggtcaaggaccgaagccgctgctataagcaaccccatcaactgcagctgacctctttcaaccgttcggagagcagttggcgagctgccgtggtagttgtcgacagcaccacccgaactctcctcttctcgtcaccagtcgacgcggctactgcttggtccagtttgtggcccagcgccaattccacgagcggcaaagccgacagacactcccccacagaggcaccgtggatccacagcgtgaagcagtcggtccttgtatcaactccgctgttctgccagtgggctttgagacatcaagagaggcgaaaaatgcgttaagcggggaaagctacggcgagacacgacacttgaagccgttctacctggtggtgcgctacgaccgaagcgctcggcggtgatggccgctggcaccagccgtcttaagtccttccgacggacgtaccaggtcacgagtggcatggacgccctccatagcccctgatacacggcgagcagcgtggtcccggccatcaaaagtatacaagtgtatactttttgatacttagtatagtatgtttaacaatgtcaaaaacctcttacttaagtacaatctcaaatcttggtgccagcacgacagttgggtttggcatggcccgctgcctctttgcgtgttcaagcagtcgctcaccgacaggtgatcaaggccgcttggatgaaccttacactcatcgtgcttcttcaacctgcaggaatcagctgctgtgctcgcgtcacgagcctcgtgatcggcgccaacgctttcgtcgagatcttgcgaatccgctcctgcctcattcgtgaagttgccgcctcggactcacagcgcaagtgatgtgactactgcacctcctcggactcgcggcggcgacaaccgccaccctgctctcttcccctgcagcggccgccgggcctcgctgcttccctgacaatttcctcttcgggtctgccaccgcgtcgtaccaggtcgagggcgcgtggaacgaggacggccgcacgccgagcatctgggacgacttttgccgtgaacagcctggcttcgagtgcgccaacgtcgccgacgacttctaccaccgctatgcggacgacatcaagctcatggtggagacggggctccagtccttccgcttctccgtctcgtggtcgcgcgtgatgaactgggacccggaaacgcggcgcatgcgccccaacgccccgggtctggtcttctaccacgctttgctagacaagttggtcgggagcggcatctctccgattcttaccatttaccactgggacctgcccacggagctgcacaacgagctcaccccgcagggatggctcaacccggagatcatcgatcacttcgtggagtactcgacgctgctgtacaacgaatttggcgacaaggtcgacttctggaccaccttcaacgagcctctgtccttcgccgtgtacggctacaacacggggctgcacccgccgggattccacgactcgcccacgctggtctacgaggtggcgcacaatgtgctgctctcgcacgcgtactccgtgcaacggttcaaagagctcaagtcgagtggtgtcgttcagcctaaagcgcgcatcggcatcgtactcaatgccaatcagttctatcctcttcgggagaacaacattgaggatgcagaagctgcggagcgcgcgatgaacttcgagttcggctggtggcttctgctcctcacctccggcgactacccgcccgtcatgcgcgagcgagtcggtgagcgcttgcctcccttcactgccgagcagaccgctttggtcaagggctcatatggcgcgctaatgctcaatcattactacgcgcgttccgtcacttcctgcgactcggaggtgtccaatacgccgtgctcttcactccacgtcggcttcgggcaggacaagggtgtcgacgacacgcatatcgttctaggctcccgtccaggactgcaggacagccaaggcaacaactactgcaagtcgtacacggcctaccctcccgggtacttggacacgatcaagtggatggacgccaaggacccctcggcgtagatcttgctgacggagaacggctggtgcggcaatgacgaggtggagaacttggaccagctgtggttcttccagtcgtacattgagcaagtcgacaaggccgtggtggaggagaagatccctatcatcggctacactgcctggagtttcttggacaactacgagtgggggtcatacggccctcgtttcgggctctactacgtcaactttaccgcgcaaaccggatccgtggagggctacaaacccaagccgacggacttgcagcgtatcgcgcgtccgtccgccaagtggttcagcaagctggcgtctacgggctgtctggacgaattgaccgagatcgatgcggttgctgccattgtcacgcgagctgcgatgagacaggaatcctcggtaattgctgcaacgagacccacttcgaacgcactgctgccgggcatgatggtcgtgatcgcggcagtcggcactgccatgctcgtcgcgacgtggcgtcgtcgtcagggatacgcggccatcccgcgcttctccgtcaactaaatccacgactggctggtcttgcactaagctggtcttgcacattgattcgggtgatgttacccgaatcaatgtgttgtttgattttctattgctcaacaatgcgaaacacggtgcaataccaaagcttattaagtacaggtcgaaacttcgacaacggcacacctttcgctttactcgcgcgaagcacgaatccactgcagggatttcagcgttgagcaatgaaaagacagctcaataatgttaacccccgctcctgaatggtctagggatgccaacacttcctgtatgattttgctcatcaagttgaagttgtgtgcggcacatcacaaatttcattggcaccacgtcgatggagccccaggtgtcgagagtcaaccatgccgcgctcgtgaacggctactacatggggcacctgtgcttgcgagaggactcactacaaattccagtcaccgcattcattcgaccgcccatcgcccatgctccgggggcgctgtcagcagctgcagcgcgtcgacaccgcaagcgcgagaccgcggctcgacggagatcggagcgacttggggagctcacagcacagggcaagttcgtgccactaagtgagcaagtcctcaatgcgctgcaaaaagcgtttgagcgttttggaggcccgcgattcgtactccgagattttctcccatcgttccaagaccacagtgacggcatccagggggtgctggattcgttgcccgcactgccgcatacagacgctctcgacgacggcaatctgcactataacgacacggatcaacttcgagtctctgctgtgagtggtgccaaggttttactgccggccgggtcgtgtttcgcccagcgagatgttcgcgagatccaccggctgccgctcggaaggcacaagctcattgtgatggatccgccctggcaaaacaagagcgtctcccgtgcgaagcgctacgacatgttcgaccacacggagctgctcaagattgatatccctcgccttgcagatccgggcgagtgcattctagcggtgtgggtcacgaaccggccgcgctacatggcatatcttcgtgagcaagcgctgcctgcgtggggcttcacgtatcatgggagctggtactggctgaagctgagcaagagtggcgaactcgtcactccgttggactcaagccatcgccttcctgtcgagacgttggtcgttgcctatcgcgcaaaagacccagagcacgagcggcgacttcatcaacgactaggtgaacagacacgaatcgtactcggtatcccgctccgtcactcgtggaaacctccgccggagtgcttcttcaaagaggatatcatcccgacttccgccatgaaagcagagctattcgcacgagagctgcggccgcattggacaagtatcgggaacgaggtaacgaacgccggagcatttcctaccgtcacgttgtcgtgtgctaaatctaacattctgtttcctttttgttttggtaggtgttcaagtttcaagcggctagcatgtttcagacagcagctaagattgatctagagtgagcaaaatgcaaagtatgaaagctgtttggtatgttcacacagggacttgggtctgctcgacaacatttctgctgccgccctcttcctcaagagaaggatccgcaggccgacagcgtctctgcgtgaattggtgtcccaaagatttggcttcgcacgcccatgggaggagcggcgagaatttgacgactttggttccagctaccaacacacattagatgatggttgaaaggctcaggtaatgagattccactatatactatcttcaggcgatgaggacactacatccccactgcgtctcagatgtccctatagcattcgtcactgcctttcagtagaattaaagtacacagtcagttgaggccgtctcagtgatcttggtgataaataaatgtcgtcacaatacccaaaggtatatcgagagtagcaaatatttttcatacatcatcgactgggcgctcaattcactcatccacacaaatacacacaatatgcaatggatcggtctcatcatacaaatgcctcgaatgttcttcacatcgggagtcagagacgtctcggagcacggcagaacgcaatgcaataagacgctcgtcatcctcagactcgtcatctgattgtgtaatcacttgagaacccctggtaagtaaggacccactcctccgcgctgcgtttcctgttctcgactgcggtcgaccctggcaagtttccgaatggctctgtattggtccctcgcgccgcttggggaatcggttggtgatggtattgttgcggtcaaaagccctcgtaaaaaggcgtaattacgcagaagttcagtttcagcgaataagaagcgttctcacacaggattggtccatattcacttcaagtcaaagcggataggaatgcttgcagcgctggaaggaagccccagtccagactcagggatcctgctggtctccgcgccgccgacgcacaatgagcaagagggaaaggcagttggaggacgagtgcgagcagctacgcaggtgggtagaggtgcaatttaggtgataattagcgggagagtcgtggctaattccgtgtgcttgttgtcactcccagcgagttgcacgccatggaggagctattgcagcggtatcaggaccaactcgcggctgctagaggcgctagctgcttctgccacaaccgtaagaacgtcccagacctgcatcgcgtggaggaggagctgttcgagaaccagaacctgacgccgagggtctccgccatgcgcctgtccagggcggagctgcctgtgctgtgtcgagccgacggcgaggaagcgcggttcagcgaggtgtctacagtaaagtgcttgaagcgtgtgctgcggagctgaagactgacttctggtgcaatgcaccgtgcatccttaggtgcagctgccgtcgtcgaactgggagtgggtgtccgattggcaatgcgatatccacgcccacacggacgagagcgggtgggtgtatgcagactcgtgggagcaactgcgagacgcctgtcaactgcatcgcaggtaggcatcatgcattgctaaaacctcatggttcctgggcctcacaatatatggcgtctgcagcgagcaaacgatgagtgcccgtgtccgtcaacgtcggtggaagcgagagcgaatgctcacgcgatctacagggctcccagttgcgctaaacgagcgtctactgacaaagagcaggctagctgctatggtacggctactattttgaaggctgtgtgcatatacgttgatcacaggctgacagaagttgtttttgatgctttagcactacgccaacgagaagctgactcaacaggtacggtgcttttggaggagttttcttcgactgtagtgagaactaatcaacggcatcactgcagcttctgcgcgcaaacgagcacattgctgagctcgagcgacgagataaagtgtacgaagcgcacatgctcaagctgcagcaggtcgcggaggagctgtccaacgatctgtacgcccggtccttcgatctgcacgaccccgtggcagtgccctacaccgtctccaaaagcatcgaggtgttgaaccagacggaggcacttttgggcgacatgctaatggagcaggggctcgcacgcttggacacactgaccgtcaccagcgaggtgcagcgccgacggtcggagattttggcagcgtgcgagaacgagctccagacaactatggacgagttcaacgacctcgcgcgcacgctggagcggaggcagtcaccacccccagagatgacggagcggccagctctaataggctagcagacaacagtatttatgagcagaagaaattggcagcgtcctagccacttcaactacatgtaccagtagtgtactgaaataaccacatgatatggaccaatcacaatcgttcgcgctctttcacaacgtcattgcgcgcgaggagctccataggcgggcaggcgggcgaccatgacggacgccgacatctatgcgtacgagcaggagttcgacgagatggacgagtgggaagccatgcacgcgcacgagatggaggctgcggaggaggagatgcgtgctgtggaggccttcgagcaacggcaggcgggggagagccagctgcagccgcctgctccagccccagctcaagctccagccactcagccgcctgtgagcagtaacaatgctgcagcagcggagaggggcgatggcggtttggagatggcgcagagccgattggaccaagtgctggctcgctgcgcgacgctgctgggcgaggacggagatgaggacgcagccatggacagcgccgagcccagagctgagccctttgcgcgcaagagcaagcagtctagtgcagctgatgtggacaatagcacaaccggatttctgtacagtcgaccgcccattgacgtgggctcgctgcccgtggtgctgaacgagggcaagaggatgtttctgcgcaagaaacgaccgagctccaagcatgtcacgtccaattctgtgcgcagctcagcgtcgtcacttgtccccattaaggagttgatggaggctgttgagcgggtaggttgtcgcggcaacttcgattggggttgctgcctctaatgccgtatctacgtgtttttgcttgattcagatggagatcgaggaggctgctgcgaaggaggacgaggctttgctccaggaacttggttcggacagcaacgattcgtcacaagcagcgaacgcagtgctctggctggataagtacaaaccgcagagcttcctggatcttctgagtgacgaacggaccaaccgtgaagtcctcacgtggattaaatcatgggacaggtttgtgttcccgaagaagctgcgacctaatggtacactccccgtgtctcctgcgaagcccaatagcttcggcaataagttctcctgggcagcgaagaatcaaggcagtggtcgcgcagagtccgaagaagacgaggacaagcgaccattcaacaagattatcttgctgtgtggccctcctggagcaggtaaaaccacgttggctaatatcgttgcgcggcacgcgggctacaaccctatcgaggttaatgcgagcgacgaccgcaccgcatcggtactgcgcaacaagctcattagcgccatggagatgcagtccatttggggagaacggaagccgaactgcatcattcttgatgaaattgatggcgcgatgaacgggtcggacgggaaatcggcaattgaggtcattcttgagatcgccaacgcgcccctgcaaaggaagaagacaggagctaaaactaccgctaagaaccgccacccgctgactaggccactcatttgtatctgcaatgacctgtacgcctccgtgttgcgcccgctacgtcagatggcgaagatcttcacgctggacacgccacactcgcagcgcctcgtgacccgtttgaagtacatttgtcgtcatgaaggcatcaaggcgtcaaccggtgcgctagcagctttgtgctccagtgctgacaatgacattcgatactgtttgaacacgctgcagttccagagtactcagtcacggcgtgcggtgaaggacaagtcagcgatcgtgacgctgacgactggtctcgttgctcaaaaggatcacgtccacggcatgtttgaggctatggatctcgtattcttcgaggcgcggtcaaagtcagccaagggcgagcgtcctgcgaccgagaaaatcgaggaggccgttgtgtcactggggaacttccctctgttgatcaacggcttggacgagaacgtaccgaagatgatcttcaacgacccgaccatgaacaagatttgcgacgtgttcgagtggctcggacttgcagatgagtacgagaatcgtgctcgctcggaacaacagttcgtcttccaggcgtacatcccgtttgctgccatcgccacgcacgcagcttgttgcacgagctcaaggcgtcgtgtggagtaccctcgcgcgcagttcgagttgcaaaagaaacgtgatcgctctgaaaacatccttgtggcattggcggagggcgcacagctgcaaccaattctgcgtatgagcaccaacgtgcttgtcgtggacgtagtgccctggcttgtcgcgagtttatcgcccaacattcgtcgcattaatccgtcactgcagacgaaggaggagaaggtgatgattcagcgcctcattgagctcatggcgtcgctgggactatcgttccgccacaagtacttgcccgacggcagtgaagactactcgctcgagccgtacgtatccattcattggcgctatcggattctgtgtacaattctcattttgttttacctttacagggcgctaaacgaactcgtggagttccgcggaaacgacgatggggcagtgtatcaatccatgcttccgttaactgtacgaaagatgatcgctcgcgaggtggagctggagcagatgcgtcggagtgaaaactcggattcgtcatcaaagccgagcagcaacgacaacaagaagcaaccagtgactaccgagaaagtagccgaagcgactatcgaagagaaggctgcgaaggtttcctacgttcgcccggagctcagcggtacgtttacttgtggaggtgtggtcttagacgaccatactcactcacagttttgttccatgactaacagaggcggagctggagaagaaggacgaggcgctccgcaagcgcaatccgttcgcgttcgcgcaccgtgaggccaagcgaaagcgcgacgaggagctgaacgccaagttcaagcagcagcgcaccgacgacgcccacgcgcactccatggtgcgctacaagttcaacgaaggctacacgtgcggcatcaagacagccgtgtacgttcgcgatttattatgagagggctaactgactggactgccatgtagtgcatgtgcaacgcaatgcaagaatgcacaaattcctacgccgtctcttcacttcttggccgctttcttcttcttcttggatttcttcttcttgtccgccggatcagcagctgccgccgaagcctcggccggctgcggttgcgacgtagtcgatgccagcagcgccttcatgggccccagcacctcctgcatcacaaagcgcagcagcctcgtgagccggaacaggttggacgcgtctgcggtggcgtatttgacagtctcctcacggccctgaggcgacgcgggcgcgggcttggccgactgatgcgccacccgcgccaccaccttcacgctcttgttggccgtctcgcgcgtcttgaggaagaagcgcgagcgcagcgggtcccccacgaacgccagcttggtctgctcctcgaagcgctcccagctcacgttggccatcttcgcctgggtatcttctagcgtcgggcgatcgtgatggacactgaacatcgggcggctcctgattggtcggctatttttggagccgttatttttagtcggtcgtaacttcaacttctgtagcatcgtgcagtacagcgctggcgatggcgatggaggagcgagaccaaggtgagggctgtgtatctggcgcgtacttaggtatggtgggctcatggtacatggtgtggcgtggatttgagcaggagcaggcgaccaagtgctcgcgctcaagcagttcctgcaggttcggtggactgaactgtagagctaaaatgcattgggctacgttctgatctttgtttttttggctcgtgcagggaatgctgcttgcagaccaagagaacatgttcgagcctgcgttgccggcaccaggcgagggagtgattcggaatgaccggctactggagctgatgggggtacccaggtccgaggcaagttcgagtgctggatgctcagcttactccctcgaggaagagcaagcggctccgatagcaccattgccgattcggtcaccccgaccacaccagcgtcacaacacttgctttccaggttgcgagtggagcctgggcccggaagacgcagtgaacgatctggaccgcgtcgacactgaagagttcgcgagcgacgaagactatgtggaagaagacaccccgcgtcaggagaagtacttctcgaagaaacacatgaacaagacgtcggaagagcttctcaggagaagtgcgaccttcgaaccagactttcaaacgcgcatgaagaagtttttgataaagaatcagcagaagaaggagaggattcgccagtctattgccgttgaagaggacccggcgatcgtaccgatgccgcgaatcaaccaggtgcagaacgacaattattttcttagcactcttactactgcgtactaaagtattgacatttgtctgtggcctacgcttcctgcagaaatcaaagtccattccgcgaagcgtctcacacctcatggcgtggaatcatgaaaaggaaagcaagctgagtcgaatgcgagatgctgagagtgccaagcaagaagcagtgtatgtggggaagccctctatcagcaggcgatccgtaacaatgttctcaaaaaggcaggacgatgtcgcgcgctgcaaagtggaagatcggctccatttgctgggtcttatttaccaatatcagcaagaggagcgaaaacgagctgaagagagacaagcggcttcgaatgtacagcctcagctggcccctcactctgcaaatgcgcagcgcaggaggcgctactcggttcatgaacgtctctaccagttgtcgaagagaagtatggggaaaggtaacaacgaccttgagcactatccaagcagttctgcagctcaacggaggcggggtcgacgcacgagccgtgaaactattgcacgcactgtgcagcgactccatgggctgagtaagaagcaccaacagaagctgcttttgcgggatgaagagcggaaacaatacttggagagcttgcgggtacgtatgccaccggcatcatgtgatagtagtggtaggcactaatggtttccatgctagaccacaccaaagatgagtgctcgaagtcggaagctagccgcaaagaagaagaagaacccggcgccaaagagccccttgcgctgcggctgctgcgggggcaaggaagacaaggaggggaagtgtggctgcacggtcgagccgcgagtgaatccaaagcacgccgccgacatctacgagcgacagctgcgctggaaaaacgccaacgacgtcagacactgtcagcagaagcagctgcaggagacgctggcgatgaccgagtgcacctttcggaacccgtactaccagaaggcgtggaataccatcggcgatccagtggctcggctcggcaagaaggaaggcggtaaagaggacagcgcggcgttcttcaggaggaccatgcggtgggcggacaagcgcgaccgggaggtggctcgggagaagaaggccgtccaggagcggcagctggaggagtgcaccttcaagccgcggctgacggcgcgaacgcccaagtacctggcggccagacgccgcgagtcaaatcagcagcagcacgaggccttagcagcccccagcagcagctgcgcatcgcggtttctcgactgctcgacgcactcgtcgcccgagcgacgagactcggccacggaggagctcctctcgcagctgtacagcgcgctggacctgcaggcgctggcgggcgagctctcgcccgagcacaactccatcgggtccgacgacaacggcgcgcacggcttccccaagtacaccttcacggacttgggcgagttcgcaggacgctgagctggatgtagagagcgaggcttagcggatagatgaagtaagatggatacgtgtgcatgcctcctgaaggtcaggatccggataccgcgcgccggataatctaaatttggcgtcgtccaatcaccgagcgttctggcacatcttttccgccaatggccgggccgctccacgaaacggcctcctcccccctttcgcccactcacttgcgaactctccgcttggtggtgaaagcgcgcgggaagctagcaagtgcggagtgttggtcgtcgcggtctgaaagcgcgcgccccgagctctccgccccctcccgcctcaggcgctcgccccccccacgcaccagtgacttagcagcgagcagccagccagccagccatgtcgtccacgcagttctcgtactcgagcgcgcgcctgcgccgcgtcaagtacctgcagttcggcgtgttcagccccgaggagatccgcgccatgtccgtgaccaagcagaccaaggtcaacgaccgcatcatcccggatggcatctcgcgcccggagacgtacctgaatggccaccccgtcatcggcggcatcggagacccacgcatgggcacgtgcgacttccgcgcgcgctgcaagacctgcgactgtacgtgaaccatgctggagccacgatacacgctgtaggaggggcgcctcactcacgtgacccccctcgccccctccctccgggccgggggacgcgctgagatcttgttcagttactcaagtgatgtgttgttctgtttggcttgactgactgcaggcacctacagcggcagcggcggcaaggtgaacgactgtcccggccactttggccacattgagctggcccgacccatgtaccacatgggcttcatcaaggaggtgctcaagatcttgcgctccgtgtgcttccactgctccaaggtgctgagcgacgagcgcgatcaccgcttcaggtcggccatgaagatcaagaacggcaagcgccgcctcaaggccgtgtacgagatctgcagcaacaagagcatgtgcgagtacggtgaggaggccgacatggaaaagatgcgcgaggacctgaacatcggtctgcagggcggtctggacgacaagtccaagcccaaggagggaggccacggcggttgtggtggtcttcagcccaagtaccgcaagcagggcattaagctgctggtcgagttccccgagcagatggaggacgtgcctggatcgggcgaccgcaaacagaacctgcctgccgcgaaggtgctctcgattttcaagaacatctcggacgaagactgcttcgctctcggactggacccgcgttgggctcgtccggactggctcgtcatgacgctgatgcccgtgccgcctccgcacgtccgtccttctgtggctatcgatggcatggcgcgtggtgaagatgaccttacacacaacctggcgtctatcgtgaaggcaaacttggcgctgctcaactgcgtgcggaagggtgaaccgtcgcacattatcgagcagttcgaacagctactgcagttccatttggctaccttcctcaacaatgaacagcccggtctccctcaagcccaacagcggtccggaaaaccgctgaagacgctgcgacagcgtttgcgtggtaaagagggtcgtattcgtggtaacctcatgggtaagcgtgtggacttctcggcccgtaccgtcatcacggccgaccccaacattgccattgatcaagtcggtgtccctcgttcgatcgccatgaaccttaccgtgccagaacgtgtcacgccgttcaatatgaactacatgcatcagctgattgcgaacggtccgctggagcaccctggcgccaagtacattattcgtgaagatggcaaccgcattgatttgcgttacatcaagaacaagtcggaccttgcgctgaagtgtggatggatcgtggagcggcatcttcgtgacgacgacttggtgttgttcaaccgtcagccgtctcttcacaagatgtccattatgtctcatcgcgtgaaggtgtttgactggtcgacgttccgtttgaacctgtccgtcacatcaccgtacaacgccgatttcgatggtgatgaaatgaacttgcacgtgccgcagtccatgactgctcgtgccgacgcacaggagctgatgatggtgcacaaggtgattatcaccccgcagagtaaccgtcccgtcatgggtattgtgcaggactcgctgctgggtgctcagaagtttaccaagcgtgacattttcttgaccaaggattgggtcatgaacctgttgatgtgggtttccaactgggatggaaaggtgccgacgcctgcaattctggtgccgaagaagggtgagttgggcaagtacactccgatctggacgggcaagcagctcttctcgacgattgtaccggggattaactttactggcttttcgtccacacacaacagcaaggagaagttctcggatctctctcccatcgactctcgcgtgatcattcagcagggtgaactacttgctggtattattgacaagaagattattggttcgtcagcaggtggtttgattcacatcacgatgcttgaaaagggtcccgatgagacgaagcgcctccttggtgcaattcagcaactggtaaacaactggttggttggccgcagtttcactgttggtgtgagtgacacaattgccgatgtgtcgactttgaagactattgtcgatattattacccaagccaaggtgcaagtgcacgatctggtggtgcgtggtcaaaagggaaaacttgaaacccagcctggccgaaccatggttgagtcgtttgaaggtctcgtcaatattgtgcttaacacagcccgtgaccaggccggtcgtgaggcgcagggcagtctggatgagacaaacaacattaaggctacggtgacgtcgggttccaagggttctttcattaatatctcgcagattattgcttgcgtgggccagcagaacgttgaaggaaagcgtatcccgtacggcttcaaccatcgtacgttgccgcactacggcaaggacgatttgggccccgaaagtcgtggtttcgtggagaactcgtacctgaagggtttgacacctcaagaattcttcttccacgccatgggtggtcgtgaaggtctaattgatacggctgtgaagacggccgagactggttacattcagcgccgtctggtgaaggcaatggagtcggttatgacgcgttacgatggtaccgtccgaaatgcgcaaggcgagattatccagttcctgtacggtgaagacggtatggatgccgtttgggtcgagaagcagcggttcgagtcacacaagctgaacaaggtccagttcgagaaaaaatatgtgtttgatccgtctgacgaagagcttggctgtgtgccgaactgccccgaccagctttacctcgagcccgatattattaaggacatccgaacgaaccagcggacacagcaactcttgcgagaggaactggctcagcttcagaaggaccgtgtcaacctgcgtgtcattttggcaagtcgtggtcaggggcaggagtccgataacgctgcccagattcctgttaatatccggcgtctggtggaaaatgcccagcagctattcagcatcgacatgaggaagccgtctagcttgcacccatcccgcattattgagggtgttaaggagctgtgcaagaagattattgtcgtgcagggcgatgaccgactgagtattgaagcccaggagaacgcaactttgttcttccagattctgttgcggtcgacgctggcctccaagtgtgttacgcttgagcaccgcctgactgagacagcgttcgaatggctgatgggtgaaattgagtccaagtttactagcgctttggtgtctgctggtgaaatggctggtgttgttggtgcgcagtcgattggtgagccggcgacgcagatgacgctgaacacattccactacgccggtgtgtccgcaaagaacgtgacgcttggtgtgcctcgcctgaaggaaattatgaatatcgcaaaggacgtgagaactccgtcattgcgtatcttcttgacacccgattgcgcacacgatgccgacaaggcaaagttcattcagtcgcaactcgaatacacaacgctggctgatgtgacggcgaacacctccatctactacgacccggacccgatgaacactgtggttgaggaagaccaggagttcgtggcgtcgtactacgaaatgcccgatgaagacacgccgatcgctcgttctccgtggcttctgcgtatcgagctgaacccgaagatgatggccgacaagaagctgacgatgggcgaaattgccgcgcaggttgagtccgagtacggtcaggatctttcatgtatcttcacggatgataacgccgatcgtctcgtgctgcgtattcgtattatgagcgatgaggaggagaagctccagcgctcgggtgagactgccgtaggacaggaagatgacacgttcctgaagcgtgtggaacacaacatgctgacgcagatgaagctgcgcggtattgagggtgtgaagaaggtgtacattcgcgagggcccgtcgacgcactggttcgacgacgttggcttcaagatgatgaatgagtggatgctggatacggatggcacgaacttgcttgatgtaatgtgctacccgcaggtcgatgccacccgtaccatttcgaacgatattgtggaaatcattcaggtgctgggtattgaggccgttcgtcgcgctcttctgaacgaaatccggcaggttatttcgttcgatggtgcttatgtgaactatcggcatttggcttgcttgtgtgacgtgatgacgttccgtggtcacctcatggctatcactcgccacggtatcaaccgtgacgactctggcccgcttgtccgatgttcgttcgaggagacggtggagattctgatggatgctgctatgttctcagagggtgacccgttgacgggtgtgtccgaaaatgtgatgcttggccagctggcccctcttggtacgggtatcatggacctggtgctcgacgccaagaagcttgcgaacgctatcgagtacgaggcttcggagatccagcaggtgatgcagggtctcgacaacgagtggaggagcccggaccaaggacctggtacgccgatggcgactccgttcgcgtcgacgccgggcttttcggcctcgtcgccgttcagccctggtggcggttcgttctcgccggcggctggtgccttctcgcccatggcgagtccggcatctcccggattcatggcggcttcgcctgcgcacagcccagcgtctccgctgaaccccacatcgcctgcatacagccccatgtccccagcctactctcccacttcgcctgcgtacagtccgacttcgcctgcttacagcccgacatctcccgcgtactcgccgacgtcacctgcttacagccccacgtcgcctgcatactcgccgacctcgccggcttacagcccgacttccccagcgtattcgccgacgtccccggcatacagcccgacgtctccggcctacagccccacttcgccggcgtactcgccgacttccccagcgtacagcccgacgtctccggcttactcgccgacatcgcctgcatacagcccgacgtctccagcttacagcccgacttcgcctgcgtactcgccgacgtctcctgcgtacagcccgacgtctccggcctacagtccgacgtctccggcttacagtcctacttctccggcatacacacccgcgtactcgccgacgtctccagcctacagtccgacatcaccagcgtattcgccgacgtcgcctgcctactcgccgacatcgcctgcgtactcgcccacatcgcctgcctactcgcccacatctccagcgtacagcccgacgtcgcccgcctactcgccaacgtctccggcgtacagcccaacgtcgccaagctacagcccagcgtcgcccgagtataaccctacggagggctacaacccgactgcgagcggctacagtccgactgatggtgacgagaagaaggaggaggaggatgcgaagtaagcatattgagcgcgtgcgtgtgctagaagaaggcgagcaaaggtgtgcattacgaaaacagccgacaagtagcatcaacccgtcctgcgctggagcaggtcgattcgtaactgtggtggagggcgtggcagccgagcaaggtgcggaccgcgttcgtcagctagtcatgcatatgtatatcgagcgacgccgccaataacgataaaagcaaaacaaacagcattggcactttcatgttggtgttcgaggccttctatcctcgtcagaactaaagtctctactgtacctagcaagatgtagtatatgcttactcgttcagcgcgatgagggccatgaggccgatgcccgcgcacatagcggtggcctccttaagcgactgagcgagggagcagtcttccagcagttccggcatgacgctggtgcacgcgatgtagatgaagccgccagccgtgaatggggagatccacaccgagctcgagtccccggcgccctccatcaggagaccaatgaccgttccgatcatggctccgatggccgtcagcagctgcgtgaccatcgcctcgcgccgcgtgaagcccgactggatgagaatggcgaagtcgccgatctcgtgaggcagttcgtgcagaagcatcgccaccgtcgtggtccaacccgtacctcttaggaatgtcgcgccgatggccagcccgtccgtaaagttgtgcgagaagtctgctgccaggttgaggtagcctgcggctgcaatggtcttcttctctggcaccgacgggaccagcggatcgtcgtcaggggccacctcggcgtcgtctcccttgccctccttgaacacggcacgcttcctggccgtcgtcttgttggccaccggcgaggcgccgccgtcctgcaccgacgccgaggggtgcgagtgtccgtgggagtgtccgtggccgccgccagtctgcgctcgcacaaacttctccagcatgaggaacgtcagcatgccggccagcgtccagagccacacgtagaggtccgccatcgagtgcgagtgcgagagcccgtggtcgtggccctcgtggtcgtgatcatggtcgtgactgtggccggcgccctcgggcagcgagtggggcagcaggtgcagcagcgcgtcgcccaggagccccccggccgcgaagctcaggaacacgcgcagcagcggctgctgcttctcctggctgccgacgcccagcggcaccaccagcagcaccagcacgggcgcggcgcccaccaaggcggtggcgaacagcgcctggccccacacgatcggggagaaccttccggccttgggctgcgcggcggcagcagtcgtctgatgactgaggtgatcgtgatggtcatggtcgtggtgatcgtgggcgtgggctccctggtcgtgggtgtcgtggtcgtgatcctcgtgatgatcgtcgccgcggactgcgggcgtcgatggcactgcggcgtcgtcggcagccgagaggagggcgacgcccagcagggccgcgaccagcagcagcagcacgcgcagacgccccatgtcggcgctggaagtcagagtgagggtgccggcgcgtgcaagaagtgtcgggattggtcgatatgaggattgcgtttgcgccaatcaggagacgacgaaaagtgtagccatgtcgagcctggtctacaagcgctggcaatagcgttgctccgggagggtacacaggtcgacgaatagtttcatggatgatgataacggataataattgagtaaatcccaaagttgttttgtttttaatccttaaaagcactaccagcccaactctctagttgattctaacgtgggcatctaccgcgcctgcttcgcagccgcagcatctgcccgagaatgcgtaattgaacaaatagttgcgcacatcgaagtgtatcgatacggaaatgatgttttagctaaacctttgtgaggctggtaaccagcaagccccgctcttctttatcgtgatgggttctcaggaaccgaaagtcaccaattgaggttgcctggtctgatgaggccatcggtgacataacaccctggtcagcgtccaatggctgcgttggcgccagcaacgagagagctatttcatttattttgcaggtaaagtatactgtgctcatttttgtactatgttgtgtgctaacgatcagacgagagagcaacagtagcagaacgaaggagatacgcatggtgcgctgatcttgaccttttaacttgaggatgttagctcagtgacaataatgatcctcaattcaaaaacaaaacaaacaaacaaacaaacttttaacttgagggcttggggggcatgtgaagttgaccaacatgacttgtctaggtgcaggctgcattttctacacgtcaatttgctcaatacccaatcactcttagccgaagatgcccaacctcgtgtctgtcgccaaaccaatcagctcaactcgacagtgacacgagcatcgttcgtttgaataagactttttccctgcgttgaagcatccacttccaaggaattggcccattagcgtatttctcattccgcaagctaagcttggtcgattatggcgcaaattgatacgcctttagcgaagccatggctctcatagtgttggagcgtccgtaagtgttgaatgcaggttttggtaaataataaacgattagtatcaacctttggtaaataatgtgcataaatcttagcatttatcgacgggtacctgattccggcagatattagcttaaacattacaattaagaaagagagacccggtttggtacccggttttggaaagttacaagttttttgccggggccaagcacaggtcttcgacctgtgaattggttcgtgtgatcagcgagtgagaagaccgctgtctgtacagcgtcatggccttgcctgccgcgagcgctgtcctgctaggccattaaggcggttgccgttagtctgcgttgactcactggctgcaactgtgctgagctactcggcctgctgcgggcgacgaggatgctcctcgtggtagccgagccggcctgcttcacgtcgtgggtgctgctgctgctgcatccaaatgcgctgcttgaagaaggtccatcctgccgttccgatggttagacggcgagggtgccttgtactgccgcgcggagatgcgtggagacgtcgacgcctgtggacgaacgccggacagcgcgaatatgtcggcgtgcagcacatccgagtcaagcgcgccgtatctccgcccggcatgtgaccaggctgcggcgacttgaggcaacttgaggcgaccgcggcggcggtggagaccaagaagacagttcgagttcgagcggagccttatgtcggcgccgtccggacggcagtccgccctcgcgtgaagcgaaggcggccatcccgagcgcaatgcagcgcaggggcagcgagacgtgatgtggagcgcgtcacggctgtttgacgggcccgtgtcacgcgagccgagtcttgccttgccgcgcggagtaaaggacgataacaacctgcgatttgtacatcagcaaccacaccaaacgggcaccagcaaccacttttgtgtacagaaccgatcctgtattactcggttctgtacttaaaagtggttgcttttctgtgcggtgtattacaccgcatatcgcaagttcgtgtcacggtccaccaacaccaaaaccaccaaaaggacgcaggcattgtctacaggtggcggcgagctgagccgcgaacaggacggtgccaacaacgtgccgacatgcctattgacctctaagaatgattaatgtctacttcaaaataactcgcgcgagttaatatgaagtcgtggattcaaaacaactcgcgcgagttaatacgaagtcgtggattcaaaataactcgcgcgagttaatatgaagtagtggattcaaaacaactcgcgcgagttaatatgagcagtggattcaaaactgctcgagttagtttgattcataacagctacatgcgtcaagctcgaaagttgctaaacgatcaggttggtaaagtgagaaaattggcttagatatttcaatgaagctgtgtgactgggtaaaataccgtcaacattcaatcctgtaaaaacttgcaagaatggtaccaacaatgctcattaccccagagagtgttggaatcaaataagaacgaggtatagtcaactaactgcacaagtaaatagcaatgaaccaaacaaacatcgttcttagcgagttagattgtagactataatttcgtggaccactaccgcagactcgagtcatcgaggcacgtggactgttggtgaggctacaccagtacatcgtaatggtagtggtagatagccgtctaacgcccaacaaattcaaattccaaagttgatatataacgtcggctacgatgtaactgcacaacgagcaataacgttcatgaggggggctaacacgtctgttttagtgaagttattgtggaaagctcgtattgaagaggtaggatatactacttgagtaagcgtttttgactggaaagtcacacgacttacagttagctcaaatgccactcacagcaagggtgtgcgcctttaatatttactcgtcggtcacaatatagctacaattcccagcgaattttcgcatcgtagtgcacacatacatattgctccaaattcagacgttgtagttgcacctcaacgcgcctaggattagtagttatagagaggttggttgagtcctaacgcctttatttaaaagtatgcagtgcgaaagggttcgtggtttgaaaccccaacgcggaccattgtgctgattgtcactaacatcgaggcagtgagcgttatggctatggatactcgttactagtgtaagtgaactctatataccttatttccaaaacaaaatactgaagtacttaagtacttagtatgctggttggctcgctgaaattcttaagcctgataaatagccctgagtatttttgaaggttatacgttgccacttgaaatatgccatatatactttagcatgcaaggtatccacgctagctgagtagtataacggacacttaggtggttcagcacgaggcactagaatacgaggtgatacccaactactctctatatattatcgaatctctgagtagagctgtaagttctgtataaatgctccacacagataaaatcaaacaatgcgtcgtaaccatacacaccactaccatctctgataacaggggaagcggctacccggtggcttagaggcaggaactggtgcgaaccttactaaaacgttttactcactcaatcggcatatactcatgtggtgtagtgatttggcagtaaacgagaatcgagctgacgaccaagcttatgtggcgacccgagtcgtcgggacatgttccgcaatgttcggcggatgctgattggccattctggaccggtgccgaagactcgtcgacacccaagttcgagacccaggacttcaagaacgatccgaacttacagcgaacttcgacccaagatccgcacttaagacgaccgttcgagccccggcgactgctccaagacttcatcgtccaatagagtcatcgagaggcctcttggggcgtcgaggaggctctgaagggtcggtggttacttggaaagatccaaaacggacgcgtttatactagatatttgtattgaatcataggaaagagaagatagaacagataagccctttgggcaacaagaacaaaacagcttttcctcccaaccactcaaggaagacgtccgggctatcggtgagttcccgtagcaattggataaacctgttggtaggattatgactgtcggtggacgcgcctgctagtatcgtagcgtgcgtttacccgtggtcaggccaagagtagtgaagaagtggccgtgtatacgaagggcgagtcatcgccgagtagtggaggagcgagagcgcactccatttatccttcccgccggagtatagctccggtaccctcgtatcaagccgtgactggctgggacccttcttgcctgagggcctgcgaggtttatattgcgtgtgagagcgtgccagcctttgctcgtggcttgtgacgctgggtttccgtcagttgactaagcggaaacacggtgcacagaggaaacatcaacctggtgcaagggaaagttcctgggccttccggttctaaccttaacaagcccattgagtcattgggacttggtgggtgttgttggtagggaaagtgtgctattatataatttagtgcgtgttcctacacgacactcacatgtaagggacaatctgggtatgttgtgatacattgcatcctaagacaaactaaatgtatgcatttgttcacacggattactttgtggctaccgtgctcgggttgaattccgaaatgctcacgtataattaccctttactaaactcacagtacagtatactctagtacgtgccatttcaatttaaaacagtataattggcctcatatcagctccgtacctcgcatgacgccacattataacaactcctaatagctgcctatacgcatgcgcaaccggagtctattctccatgtattaatacaactcactttatgatgtctcgcgagtaatttaattcaaattaactcgcgcgggttattctgaagcatctggaccattttaacgcgcgcgagttattttgaatttgaaccaggcaaagctatactgagctcaagtagatgtacatgtagtttgtgtagcggccattcgcaggcgcccggcttagcgcaggaacctggagaaagggcagtagaaaggacaggttgctagtgatcgaaaaagtggttgttgacgatcactttccagctcttttggttgttctcgtcttttttaggttgccattgtcccaaagaaggctgtttatggtccaaagttggtacactggcgacccggactctgccgcgcgcttcaagcagccgtgatactcgccgctttgcgcaagcgccgacgctgcttgtgccgagtggggcccggagcgctggctccggcggctggcgcggttgatggcagctcgctgcactgcagcctgcacaagctccgcggcgagtcgttgagaggcgagcagatcatcgagatcgaagcgggctcaagttgcgtcaatctctctcgtcgcggcagtgcaattcgcatggggacactctgcaggacgctcgcgatgatgatggcttcccggctggcggcgcgctccaccgagcaaagcccgactggtttaacgccgcccggtctcaacacaccaggcaggacggcgactgcgggggctgctgctgccaccgcgtcgagacgcagcgagcgctgttctgcccgccggcacgccgtcggcaggccagccagcgcgctgaagctccagtcgcctccagcggctccgctcggatttggcatgactccatggccggcggagatgcgcctcccacggtcgcagaagacggttcgcgcgagtctttggcgtcgctctccatgcgtgcgcgcgggcctcacctgctcggcggcgatggcgctagggcactgccgccactgccggaccggcacggcagtgccggtggcgagccgacgactgcgcgcaggtgcgagggccgctctggccgcggggcttcaaagggctctgcttcaagccgccgggccatcaggcgtgtctaaagtatttcggcggccatccggttccctctcggcagccacggccgggccagcccgcgaatgggtccccttggcgagtcacgcgcggcgagtggtttacccatctcggaatgggcgagttcggcgacggcgccagctggctgccgctcaccacatcaggccgcgcgcgggctgctcgtagcggatcattttacgtttggccgccgcccaggcagcacgccgcagtgagtcaacagccccaccgccaccaccgccctccttcaccatgatgtcgctcctcgcccagccgctctcgccccgctccagcagccgcctggtcttcggcgcctacgaggccgcgcccatgccggtgccgatggccgcagcctcgcccagcggcagcagcaccagcagcagcaacaacagcagcatcaacaacaacaccaaggaccggcccttcgtctgcgaggagcccggctgcggccggcgcttcaaccgcaagttcacgctcagcgagcacaagaagacccacacgggcgagaagccctacgtgtgcccgctggccgagtgcagccggcgcttcagcacgtccggcaacctggcgcgccacaagcgcctgcacgcgtcgctcaagcccttcgagtgcgacatcaacggctgcaagcgctccttccccagccaggagaagctcgaccaccacatcaagatccacacgggccggaggacccacatgtgccgagccaccggctgcaccaagaccttcagcacggccggcaacctcacgcggcacatcaagaaccgccacccggagctcgtgcggactaccacaacctacccgtcctaccagttcccgcgccccgtcatgccgtcccccatgcaccggccagaggctccgaatggcatccattcgcaacccctgcacattgccgacgtccggcatgacatgccgtcgcctcacatgctggccaagatcgagccgaccccggtcttctcgcccgactcggtcgagctgtcgttgttccaggacgagctctcagccttccaaatggcttgcgagccacccgtgcagccgttcgcggcccggccgcaggagctagccgtgctcgagggccaccaccaccaccagcacccgcagtcgctgagcgagatcgcgcgctgcagcatgagcgtgctggacgaggtcatcgagttcgagctcaccaagaacgtatgagcggtagtaggttgtgagtatttccaatcgtatattgatatagtacatgtagactttggatccccgtcatttcccgaaggacgttcgtcaatcttcgttgtaggatacgctgcagatccgatgcggcgccattattggcatttcgtgtagtgcacgcattgcagcgcggggctggcaagcagcaagcaagcaggtaggtaggtatgtaggcaggcgagcagaagcaccgttgcctgccgtgttcgcgttcgtgtagcgccagcggagccgagtcgagcgcgcgataggccgacacgtcaatcggtcgctgcctccgacaggccggccggcttcacttcaaccacgtgggctgggcctcgctctggcacctgcggtggacaccgccggcaaggaacaagcatggcgcacgggccgaactgcaacgcgcgagcttgaactgcaagggcgtgggaacgatcaaatcgaggacaagctctttctgcgcaggtggtgtcctgctcttttcctcgacttcaagttgcctctctgagctttcgcaccggcacccgtattggaggtgccccaccaagctcttgcaccagaatccagacacgtaatacgggcaagcgcttcctgcagctgttgactcgcgaggcccacgtccgtgtgagctagcctcgtctctttaagatcgcgttacggtgcaggagccgctgcagcagcagcagcagcaggaggaggaggctgctaggatatctgcacgaacaccgaccgaccgaccgcgctctgacccacagcttcgcagctcctgggcaatttttgcttgcctgccaaactttggccctaggcgcgcgcgtaccatcaagcacctgaccaacctgacgtcacgcgcggaggcgtgcgttggcggagacaagttcaacttcacggtgtcgcgctgcgatcgagcctcgctgttaaacgagcgccgcggcaagagagagagagagctgatcctggttgctttgggcgggcggcttgccggtttccggtgcgaaggctgctgatgaacgggtgtttgcaaatcctactcgccagagcttcaactgcccaggaccaggccgtccgaagcgctacatacatgtacatacagtattacggcaggtgcaacagcaacaacagcagaattttgtctacatgtagctgccagcgcacgcaccggcagcgtggcgtacgtatccctgccttcgagtcggtctgttgccggcgacatatgatgatgtctgtactgccctgtgtgcctgctcgcagcattggaatctcagcttcaagctcagcttcttcgagctcgctggttgtgcccaatttcgcctgcgctgttcgccgctcggcgagacgcccgggctggtgcttacatgtagaagagctgcgagcgtcgccgcattgcaggcgatcgcatcgtctccgaaaagtcaccacccggactgacaagtgctcgggcgtggtcctgccagtatgtacaggttgcagtactacctcaagttcgcctggtcacatgagagacaagtcgggcgcatcgcgtcccggatgtgctgcacccgatcgatgccaggcagacttgcctggacctctgcaaaatttgcttgagcgagcagcgcggagcgctcagtcgagtttggacaaggcggagagcggagtcgacccaggccggcagacgtacatgtagacgcaggggaggaacctctgcgccccgacaagagcgccagccattgtccggtgactgaaatctctcctctctccgagatacgtttgccctgtgtgttcatgccgtggcgcgatactgttctgcagcacattagtccgacctcggcgccgctttcgctgtcaagagctgcgcatgtacgtatgtatgtaccgcgcctcggccttcacaagtcgtcactaagtcgctcgatcgtcgcgatttgtgtttcagatgcatgcatatgcagcccatcgccatggccgcgttaaaatggggccacgttatccgaaatgcacgacgtctacgctaatgggacgccgggcctgtgtgtatcaagtcggtgggtgggtgttgggcgtacgagggtttctgtgtctctagactgataacagtaccagcgcacagtacggcggctttcgcgaaaacgtttgcgctggcaactaatgccacggcgttcttcttccatcggccaaggcgagcaggagctacatgtatttacatgaatggtcaacgttagtcgacgttgtagcgcgttgttgcggtgcggaggtgcaggctagcgcgagtggcgcggcgagggtcatcgaggcgtttaccacctgacgcgcgtgaacacggcgtttccagcaatcggtttcgatgcttgaagggatacccagttttggagaaaaacgtattagacgttattgatacacatttttgtcattgtgttgaggtgttcgagtactactaactggtacgtagtataaggttatgccggttgacgcgttttgtagctcgactacagtgttgttttaatttgcatgagaatgcataagcttactgttaaccgaagcaaaagttgtacaagagtgggtgtgttgctgtccgaggtattcacgattttcggtagaacgttcatgtttccacgactcgacgcctgcagtgcaagatacaactaattgatggctctgttcagctacaatccgtgtctcaggaacgcgttcgcggccgtacagatgaagggtggcccgatgcctgtgaaaagtgacccgccacgactcgatactttcggatacgatgagcatgagcaaacactagctccgtcaaacattaaatcaaattaaccatgcacgttacgaaggcgtacatgtttttagtacgataatcgcttcatggtaagtcgcaggcgtgagggatcattcattattgctagtatcccttcaagcatcgaaaccgattgctggaaacgccgtgttcacgcgcgtcaggtggtaaacgcctcgatgaccctcgccgcgccactcgcgctagcctgcacctccgcaccgcaacaacgcgctacaacgtcgactaacgttgaccattcatgtaaatacatgtagctcctgctcgccttggccgatggaagaacgccgtggcattagttgccagcgcaaacgttttcgcgaaagccgccgtactgtgcgctggtactgttatcagtctagagacacagaaaccctcgtacgcccaacacccacccaccgacttgatacacacaggcccggcgtcccattagcgtagacgtcgtgcatttcggataacgtggccccattttaacgcggccatggcgatgggctgcatatgcatgcatctgaaacacaaatcgcgacgatcgagcgacttagtgacgacttgtgaaggccgaggcgcggtacatacatacgtacatgcgcagctcttgacagcgaaagcggcgccgaggtcggactaatgtgctgcagaacagtatcgcgccacggcatgaacacacagggcaaacgtatctcggagagaggagagatttcagtcaccggacaatggctggcgctcttgtcggggcgcagaggttcctcccctgcgtctacatgtacgtctgccggcctgggtcgactccgctctccgccttgtccaaactcgactgagcgctccgcgctgctcgctcaagcaaattttgcagaggtccaggcaagtctgcctggcatcgatcgggtgcagcacatccgggacgcgatgcgcccgacttgtctctcatgtgaccaggcgaacttgaggtagtactgcaacctgtacatactggcaggaccacgcccgagcacttgtcagtccgggtggtgacttttcggagacgatgcgatcgcctgcaatgcggcgacgctcgcagctcttctacatgtaagcaccagcccgggcgtctcgccgagcggcgaacagcgcaggcgaaattgggcacaaccagcgagctcgaagaagctgagcttgaagctgagattccaatgctgcgagcaggcacacagggcagtacagacatcatcatatgtcgccggcaacagaccgactcgaaggcagggatacgtacgccacgctgccggtgcgtgcgctggcagctacatgtagacaaaattctgctgttgttgctgttgcacctgccgtaatactgtatgtacatgtatgtagcgcttcggacggcctggtcctgggcagttgaagctctggcgagtaggatttgcaaacacccgttcatcagcagccttcgcaccggaaaccggcaagccgcccgcccaaagcaaccaggatcagctctctctctctcttgccgcggcgctcgtttaacagcgaggctcgatcgcagcgcgacaccgtgaagttgaacttgtctccgccaacgcacgcctccgcgcgtgacgtcaggttggtcaggtgcttgatggtacgcgcgcgcctagggccaaagtttggcaggcaagcaaaaattgcccaggagctgcgaagctgtgggtcagagcgcggtcggtcggtcggtgttcgtgcagatatcctagcagcctcctcctcctgctgctgctgctgctgcagcggctcctgcaccgtaacgcgatcttaaagagacgaggctagctcacacggacgtgggcctcgcgagtcaacagctgcaggaagcgcttgcccgtattacgtgtctggattctggtgcaagagcttggtggggcacctccaatacgggtgccggtgcgaaagctcagagaggcaacttgaagtcgaggaaaagagcaggacaccacctgcgcagaaagagcttgtcctcgatttgatcgttcccacgcccttgcagttcaagctcgcgcgttgcagttcggcccgtgcgccatgcttgttccttgccggcggtgtccaccgcaggtgccagagcgaggcccagcccacgtggttgaagtgaagccggccggcctgtcggaggcagcgaccgattgacgtgtcggcctatcgcgcgctcgactcggctccgctggcgctacacgaacgcgaacacagcaggcaacggtgcttctgctcgcctgcctacatacctacctacctgcttgcttgctgcttgccagccccgcgctgcaatgcgtgcactacacgaaatgccaataatggcgccgcatcggatctgcagcgtatcctacaacgaagattgacgaacgtccttcgggaaatgacggggatccaaagtctacatgtactatatcaatatacgattggaaatactcacaacctactaccgctcatacgttcttggtgagctcgaactcgatgacctcgtccagcacgctcatgctgcagcgcgcgatctcgctcagcgactgcgggtgctggtggtggtggtggccctcgagcacggccaacttcttgcttgagctaaatacttcatctaaagtttattttgacaaatactggaaagcaaactacctggcagttgtatagtttgacttcacacggcacactcagccgatgcagcggttccgtcgtgagtttggtgctgcatggcgacaagattttctgtggtgccaaaccattgccggtacttctgaagatgaagctgaagatgctcctcctcgtcagtaacatgcacgagttgaggtcgaatatgtagcgcatcaaaaggtccaaacgatagatgcagcagcgtggatgatccgtggcacggagtgtttcggggagacccacatgaaattatggtacaacatggctacagtaaaactgtagccatgttgtgatacccggttttgtcgactcctgtgcatccaagcgcagccgtatcaaagcaggaggctcggggccgatgccgcgcgagctcatcactctgcaggtgggccaatgcggcaaccagatcggccgccagttctggcagctggcgctggaggagcacgcgcagcactcgcggcgcgccgtgttcgacgagagcatgagcagcttcttccgcaacgtggacgcgcgcgcctcgccgcccatggacctgccgttcaacgcgggccggtcggccatcaggtcgctcaaggcgcgcgccatcctcgtggacatggagcagggccccgtggccgagacgatggccgggccgttgggcgagctcttcgaccagcagcagctgctcacggacgtgtccggctcgggcaacaattgggcgcacggccactgcgtctacggccccaagtacgacgagcagttgcaggacaagctgcaccaggccgtggagctctgcgactcgctgcagtccttcttcgtcatgcactccatgggcggaggcacgggctcggggctcggcacgtacatcctggggctgctggaggaccagtacccggacgtgtatcggttcgcgaccgtcgtcttcccgtccgaggacgacgacgtggtcacgtctccgtacaacagcatgctggccctgcgagagctcacggagcacgcggactgcgtgctgcccattgagaacgaggcgctgatggaaatgtgcgccaaaatcgacagggggacggcgtcggccgcgctctcaggcttcggctcggaggagagcgcggctcgagtagtggacgactcgcggctcacggacggtgtggacttgaggcagctggagaagttctacaagagtggcaaaggccccccggcagcggccaccaggctggccaagaagaagggcggagcagcagcagctttcgctggggctcagaagaagacgagcgcgttcggggagatgaacaatatcgtggcccggctgctgacgaatctgaccagctccatgaggttcgagggatccttgaacgtagatctgaacgagatcacgaccaacctggtgccgttccccaagctccacttcttgctctcgagcatgagtccggtcttcgcgacggccgacccgaggcagcagcctcgccgactgaaccaaatgttctccgaggcatttcaaaggtacgtgtggtctggggtgacaatgggtggggtactgcggagatactaacctttatatgtgcgtttacggcagggaccatcagctcatccgggccaacccccgagctagcgtctacttggcgtgcggcctcttgatgcgtggaaacgtcgaggtgtccgacatcaacgccaacatccagcgcctgcagtccgaagtgcgcatgatccactggaatcaagagggcttcaaggtcggcgtctgctcagtgccgcctgtggggcagaagtcgtcgctgctgtgtctgtccaacaactgctgcatccgcgagacgtttgagcgtctgcacacgcgcttccacaagctctacagccgtagggcgcacatgcaccactacaccgagttcatggacgtcggcatgctcgacgaggcgcaggagaacgcgcgatacctcattggagagtatgcgaagttggagagcgcgtccgacgccacgcagccgacaatcacgcgaagtacgagacggttgcagccactgtactaactctattaacttgaaccactggctcaagtccagcctgaactatcgacagtaacgctgcttggatggaaggagtgaggtggtgagcgttgcaggttctgagacgatccagcggccgggggtgaacatctccatgttgattccaagacgcgacagaagccgttgtttatttcaagcaaatacggcttcaaaccttaacaactgcggcatgcgatctggggtgggttcagccccatttcgtagcacacgcggatagtcgaccagactaccggacggaatgagctcattcctcattttcgggcgagtaagcttactgctggaataccgtggagtcgagggaaaatgagtcgactgggcgatccgcccgtgagagacatcatgttgaggctctcgcggtcgagtctgtcgcagcgtgatcgtgagctcaccagtgacgacgagcagcagcgccaacaagatcggaagcggagaactacagcatcaagcgacgccttcgtttgcatggggtcaccacccgatagtttactgcgagatccggaacagctacagcacttggagatcggcgattcaagggctccatcggagaccccggcggtcaacatttgggaccgtcggtggtgcggcctcgtgctccacagcgtcgctatcggcatcgtcagcaccgtcctaccgctgtgcgtctaccccttcctcacctgcaacctcaacatggaaggcacgcagacgctgtcggcgcgcacgctgctcggtctgccgtgggcgctcaagccgatcttcgcgctgttcgtgcactgcttcccgctgctgcctcgcggcttccatctccgcgctgtgatgatgctgggctggagcgtcacggcttgcgctctgatcgccatctacttccgggagcagccgacgccgtacttccaggaccgcaagatggtcggcaccccgctgacggagctgtcgccgcagcagctgagctcgatcaacctggacgctccagcccacggcgccttctacgtgatgctgatgagcgtggcctctgtggggttcgtgctggccgacgtcgctggggacgagctgatccgagatgtggcgacgcaccacttgggcgtgtcggtgtctccacgcgacgaggacgacgtgctgcagccggtgatgaccaagtaccgtgtgctggccatgctgggctgcttcctgttcatgggcgtgggcatgagcgggtgggactacggcggagactttgacttctcgctcgagtacacgcaggtgatgctgctggtgggactggtgtccatgctgccggtggctttgctgggcttcacggtgggcgagacggctcgagagcgccggtcgctgcgccagtcgctgcgacagatctggtcgctcgtgcacaactgcgcgctgaaccacgtgctgctgtgccggttcgtgggcggcgtgtgcgctggcgtgagcgccacggcggtgaacccggtcgcgttctactacgctggcgtgcagcctctgaacgacacggtcgtgtcgttcgtggccatcgtcgtggtgctgtgggcgttgagctgggtgggcaagcaggaggactgggacgtggactaccgcgcggtgatcgtcgtgggcacgatcgctgcgctgatgctggactgtggcgcgacgctgttcacgatctggggcgtggtgcgcagccagtggttctggatcggtctgcccgtactggaggcgattccgtcggcgctggactacacgatttctacggtcgtgctgacggagatcgccgatgcgagcgcttactccacggtgagtgcgctggtcacgagcgtgtcgttcctggccggtccgctcggtctcgcgctgtccaagtacgtggacgcgctgtttgacgtggcgaaccaggacatcatgagcgacacgactggtgtgcgcgagagcatcatggcgacgttcttcatcgcgtacgcgttgcagctggtgtcgctgctgtggctgttggtgttgccgaagcacgcgagcgaggcgcacgagatgaaggtgcgaagcggaaactcgacggtccgtggagtgggtctgctggtgctgttgtgtctgagcttggtgttcgtggtggcggtgcacgcgctgtcggtgtacgagccaacgtcgtgtttgggcttttctggtggcaggggctgctagattacatgttgacgttgaagttgaactggtcttacatgccaatcaaaaggactggagcattcggtggagacgcaatgtgcagttcatcttgcaagaactagagaatgtaaaccggttgcaaacggaatccggattgcacaaccggatgcatccgacttgaatccggataatccggattgagtcggattataaaagtatgcatttctacaatgtactccttaaaattaatgtataaacggtataacaagacattgaatatcaaatctcaggggtagaataacgacgccaattggatgaaagaggaaagattatgtccaattagagtgctagtacgcgtcggtgatttctaatagttttggtcaatagcatttagattcgatatcaaagtttacgccgttctctgacgaaacagtcgaagccgagcctgcggagagaacgtcgagcatggatgcgactggcgctgccaagacgacggcgaaaacggagagcaccctccgcatcgctactgtacacatctagctgtgactgtcactcgtcatttgcgtgcacgtgcgccagcagaagcagaagcagaagcagaagcgcggcgggcgaggccgcccaggccatcgtcgacgatctcaagaagctcaagttggggcttgagatgcctacggtgctgcagacctccgccgaggacggtctcaggaagagcgacaacaaggcgctggacaacctgctgctgcgcaagatgatcgtggtgccaagctccgagatctacggcggcgtgagcggttctatgcctttggctcgccgtcctgcgcgctcaagagcaacctgctgtagatgacgctgctgtgcaatttcaagagcggcaaccacaagaagtcggcggtgctcagcatccagacggcggtcatggactcagacactctggaccgactgctggcgggcatgtcactgctcgagatcctggtgaacgacaactacagcacgttctaggaagacgtggcgcgagatgtcaagccgtacaaggtgcgtaaacattgcaatgggtgtgggaagagaaggagacttacggatattgtgcgtggtaaatgaacgggatgcaggtgaacctgatctaccccgcgacggagcagcatctgcgcaagcacgcggaccgtgctagtggagaccaagggggcgtacaggttctggcgccgccaattcgtgtccgccgacaagctgctggagattgagtgcacgaacatcatgcccgaggtggtgctcaaacgtcgggtcaagttgactgcttcacggacctcatggtcaagtgctccaagtcgggcgcgctgagaagctgctctaggacgatatttgggcaagtacccagacccgagccaggaggaacgcgagaagtacgagatgcaggacaccatggccgagtcatactcgcccgaggcaatccacgagatcttccagcagtatgacatcaaggcgcatgcatggacgcggaccggagcttccccatctcgttcaacctcatgttcaagtgcaccaatggctcccaggggggacatactggctacctgtgtcccgagacgacccagggcatcttcctcatcttccgctgtctgctcgagtataatatcagcaaggtgcccttcggctgcgcgtagatctacagtgccttccgtggccgaagactcgatccggcctcctgcatgtgcgcaagtcccagcatgcctgttgtcaacgaggagccgccaccacggcgatgaggagcatgtacgcgcgctgcgcccgcaagatcagcagcgtcaagaagatggacctgacagccatgcgtggtgagacgtccgagctcaactcaccaataaacaggtgtgcaaaggttgctgcggacacggacacgcaatacaaggcgagccagggccgcatggtcgccgatgatatgatgttcatcacaccgtggagctgagccttgctgagcacgtgctcaccattttcgtgcgcattcgcagcgtgtacatgcgtctgacgccaggagctgcgcatgcgcatccagagcgtagtactgccagatgcttttgttggtgtttgacgccacagaggtggagtcggagagtctgcgtctgcgtcggcgtctggcccggtggctactgctactgtgagcatgtcgagctgatcttctgttcatgctggcactgctgctgtgagcggtgcttctgctgctggtggggcaattcgcgctggcgcgtcggtggagaggaggtgagtattatgtcgagcgctgcagtaagaccggaaccaacaacaagacgaagagcgcattcagtctgtttctactgtgacggcgacaatgagcgaaaaggtgatcgctgcgccgacacctcggtgatgaacagtctgtacgaagctccgacccaagatgagctgcgtcaaggtgatgacgttttctcctgatatcgatgcgcatcgctgctgctagagagactttggagcggcgcttcttggcggtggagcaatcacagccagcacacacagagccggatgatgtgggtaacgaacacgagcgactacggcgctttggtgaatatgctcccaagctcgctgaagcagagcccaagatcccacacatagcgatgttagatcagggcgcggccgggcagtgtctgtccacgctaacacgctgctggagaagacgtaggatagcgaccatgggcaaaaggcgggccaacaggtgcagcaggaggacgaggacctggtgatgatcatcgcgtcggacgacgaaatgtccagtgtcgagggcagctcggactcggaggacgagcaggaaggcgcggggctcaagggcgccgtgcggagccgccagtagcagaaggagagccgaaggagaacgagatcgccgaggactttaagttcgacgacggcggcaccttccacacgtcaggcggcagctcgtgggacttcacggccgccatctcgcgcatcgagaagatggcgagcggcacccccgcggccaccaggcgcacgcccatccaggccaagatcgagaagcgccgcaagaaggagaccgaaaaaccggccacgagaacggtgactccgaggaagaagaagagaaggaggaggtgacggcgacagcgagagtgaggacgagatggaggagaagtcggagtcctctgatgacgagaaggaggagcaggatgtggaagaggacgatgttgtcgtggaggaggtgaagcgtctccaatcgctgctggaagagctggtggacgcgttggagaagaaggctgccgagttcttcgggacggaccctttcgctgccaaggagttcggcaagaccaagttcaagcctttcgccgacttgaagctgtctcgccccattatgcaagccatctagcacattgtctccgaaaaaacggacgccgattccgatccccatcgcgctcacggacaaggacatctgtgcccaaacggctagtggtaagaccgctaccttcttgctgcccattctggagcgtctgctgttgcgttcgcgtcgtgtgcagtccacgcgtgtcgtgattatttgtcccgtgcgtgagctggcgacacagtgtcagtcaatgtttgagcagctggcgtggcttaatgaagatctcacgaaggtgtgctttagcgtgtaggttagtgaagatgtgacctcaaaacagtacgaacaactatataaacacacattatattgtgaatgagcttactcatgagcacaagtcgctgcctcatccgtattcgaaaactcttggtcactcagacggcgattaaagttaaagaatgacttcagctcgcagattgccctcaccgtatcatcacccaagcgagcacggcgagcgttgagagctatgcctgctgctgaaaatgcaacctcacttggaaccgacgttgccgtgaccgccaaaaaatcttgagccatttgcttaatacgaggatagacgtcccacgtaacttgaaaccacgcgcacacttgcttgctttctttcatctcactcatgccttcatcagctgctagccacctgtcaagccctttcgcgaacgacgaatcctcacgctgcatttcccaaccgcctaaaaccccgctactttcaagctggctgtcgcctatatcgtccacaggggtgccatcggatatactttcaccattctgcttggaaaaacgcgccatgaggcccttcagctcgctacctcgcttcttttttgctgacggcggaccggaggctagttgctgttgggccagaaatgcttcgcggtaattcttgttgaactcatcttcaatttcctccttgacttgattgacatcttccaccaagaggtgcagataccgcttagcacgaggatcaagagctagagctatccgggcttctcttgtatttaccttcaccgtgtactcatccatcttggacttaacagctccagcaaatttcagtgtctgctcgtcttgttcggttgctatagtttccgttgcgtgaaactggatcaaagagtacgcgtagagcagaatcccgaacgtaggatacgtcgacgcagatagcatatcagtggcttctttgatgggcctgagaaacttgtaaagagcgtccacagccgcccacgcctccactgaaatctccttggccagcgaatcacttggtcgaatactgaaatccgtatactcacggatcttaccacgaatacggcgaagcaactcgttcaggggctgctttagcgttagaaggctctccatcatagtccacgttctattccatcgtgtcggcacatcaagcttagtggttataaagttttcgtccaggtcactgcacaccccttgaagcgcttcagacagcttagttgactccgaaatctttttcacgatgtcacgcaaatggccaattgcagaatcgacaaatggacactccttgagaccttcctttactgtcaactgcagaacatgcgcggtgcatcgtagttgaacaacagttcttgaagtcgagctggtggtttgcccgcgtggcgatcctgtggtgtggtaataccacttaaattctcttctaccaaaaggtattagagacaccaacaacacgctaacccgcaaaggtaagcgcttattggatcaaaacctgaagaccaggaacgatcccttacaccgggtcggttgcaagcgcctctgtgcaccttaggttgtcttcggtcaacccaaaaacctgtaccactagccacgagctaaggctaggatactatgtagcgctttcgcgcaaccccactgcagtccctcagaaaggaagggtaccggcgtgttaggccttatacaggggaaccaaggtaaaacctcggtatgtagactaatacactcagggaactcttatcccacaaatatatactgaacgatactctaataccgttcctgcctctccggccacgccaactcttggcgctgccgaggaaactctcggtcaatgcacgataagctccccgacaggcatccacacgcagccgagcgtatccaggcactacaataagctagctacacttaccgaagtcggacttgacccatgttggctttgggggaagactgtctttttattactgatttttctgaggccctggggcctcgttctggtcatcctatgatgagtcctatgtccctatacaaatatctagtgtgaacgatcgcaataaggcgattctggacacatcaaatgacgaccgcggctacactaataagtgcggccgaagtacgtaactaaatgcatctgtacctaaaagtgggtaccatgaagcctcgttcggggttctattaggacccgacgaggcttcggccactgcctgtcactctaccgagggtaatgtcatcatccaatcagaagcagccatctccgtctctcgcttgacctcgccttgatcgccccttgattgaacttgattgtcgggctggcgggtcaacagcgttggaaactgccactttccaataccacgatccagggtcggtcaattctgcttgagccgttcgcgaaagtctttcaatatcgcgctgcaaccgttcgttgatctcagctaccatggttgtgttattggtggcgttgtcggcagtgatcgtccacatacagcggagaagtgaggcatccatgtctttcactgcgcgaatgaagtggtcggcgagccgtttaccagtgtgtggatacatcacgcgtgtaaacgcaataatgacagacctcatcacccagttgctgtcaataaagtgcattgtaactaccatgtagcctctctttgacggggaagtccacaggtcggtcgtgaagctgacacggcgtccagccacttcgcgacaaatctctacgcgagcaacatccttctccactttccattgaccgaggacttttttgcggatagtctgttggtacggaacactgtactccggacgcaacgccttgcaaacctccacgaactcctcttggtcgacaaccgcaaacgagtgtgaattcacaacgatccatttaatcagcttatcgacgcagctttttacagcgtctggggtcatcaccgcggcggctatgcggatgctgcctcgagcattcgatggtagggcgctggaattgccgtagtcctcaggatgatagtcaacgaggtgtttccggaagttaccagtgttacgactgctccagatctgctcgtcagccgtacacagcatgcatttgtagatacctgtattgagctcttcaacgtactcgaacacatcagaagcgttcttgcgcttgcgtttgtgacccacggagctagcaacaccgacggaagagatggacgggccgatagaagaaaccgtagagatgctgtcggtgtcgtccatgctaggcagcgatccttcggttcgtagtgatgggacttgtgtgcggcagtgcaccgccggacttgacgtgtgacctgaagggcgtgggttggtgccacgtactccgtggccttggaagcaaaatggagaatgaacgtgaggtagaagtaccgtggtttcatccggttacctccttgaggttggcggctcccgcgtagtggtcaaggcttgaccgtcaagcccatcccgagtcgggattcccgactgcggtttgccctctactggccgatatgctcgtatcacgtcaatcaggtacaacaaaatacacagagtaacattgaagcacgattggtcaatttctgtccaatgaactcccacgccaaacggattcgatccgaatttgatccgttttaaatccggttgccgcggattggattcaagtctattcaaaacggattggctcatccgtttacattctctagcaagaactgaggtgagtcagcagcactgcgctcgacgagcgaaaacttcagaagtgcagagaagcgggaaacgcaggcagcaatgatgtcttcaatataagtgcattcaactttcaaaacactgacgctaaatttccaccggaaggagcggtggtcggtccttccgagcggttcttgtgctgcgaactactgcagcgcaagcaccgagcgcttaggggttgtacatgaactcgctcaggaactgggtcaggttctccggcttggggaccgtggcgaagcccttctggtagccgtactcggccacagtctcagcgatcttgagcgacacgttgcggatcgtggacagcggcgggtacacgcagccggtctccaggtcggcgggggtggtcaggctggccagcgtcttggcggcgatgatcatgacctcgtcgtcgacgtgggtcaggccggccgctacgatgccgaggccaatgcccgggaacacgtacgagttgttgccctggccgggcacgaagcgcttgccgttgtacaggacggggtcgaacgggctgccgctggcgaagatgcacttgccgtccgtgaacgtgtaggcctcctcagccgtgcactcggccttggacgtggggttgctcagcgcgaagatgatggggcgctcgttgatctcgcacatcttctggcacacctccttgctgaaggccttggcgatggtgcacacaccgatgagggccgtgggcttgatctgctcgatggccgacaggaggtccgggcacgcgggggcgtcgtgggcgaacagtagcttgtggtgctgcagcgactctttgcgggagtcgacgatgaggccgcgcgagtccaccagccagatctgcttgcgggactcctccacggactttccagtctcctgggcgatggcctgggcgatcagctcggcaatgcccgtaccggcctcaccggcgccgaggaacaggaaggtctgctccgagatggccttgcccgacaggggcacagcggccagcaggccaccaagcacgaccgaggccgtgccctggatgtcgtcgttgaacgtgcagtgcgtgttctggtacttgcgcagcaggtggaaggccgtcgagttgccgaagtcctcaaactgcagcagcaccttgtcgccgtacttggccttggccgcgttcatgaactcgtccacgagctgctcgaacttctcgccgcgctcgcgcttctggcgcagaccaatgtagaacgggtcggccaggtactcctcgttgttggtgccgcagtcaagaacgacgggcaggcacatctggggcggcacgccggcgcaggccgtgtacagcgacagcttgccgacggggatgcccatgccgttggcgccctggtcgcccaggccgaggatgcgctcgccgtccgtgaagcaaatggcgcggatgtccttctccggccagttgtccaggatctcggcgacgtggccgatgtccttgaccgagatgaagaggccgcgcgggtgttgcgcgtagttgtggctgaactcctggcagccctggccgaccgtgggcgtgtacacgatgggcatgagctctggcgtgtgctcgatgagcatgcggtagtacacgtcctcgttggtgttctgcatgttctgcatgaagatgtacttctcgatgggcgacggcttgcggcggagctgggccatggcgcgctccgtctcaaactcggtcgacgacacggcggccggcagcaggccgcgcaggccgagctgctggcgctgctcctccgtgaaggccaggcccttgttggcgatgggcgtgcgcatggcggtgtatccggcgttggccatggtggtggcggtggtggggtggcggtttgcttggaggtggaggagacgaatgcgctcgagacggcaaataccagaatgaagcactgaaggagaccaaagccacgtcagttttggctcgctcgtttctgttctggtccccgtgtgaaggggcgcgggtccaaaaatgacttggaaactgtatgggaatagtctctgcaagaggaaagcgccgtcacatgatttcacaaacgggcctgggtttttcaaggattcaacagaaacgggacgcatgggtcttttgaatttgggacacgctgcttggtgcaggcgcgcttcttgctcggcccttcagacctgcatgactttcatggccagcggtagcgaaaggcaacgtaagcgatcccgaccgcgtaaacggctatgttaccgccgaacgctggcgcttcgtgtattttgtcattgcaaacactccagcaaagtgtcgctgccaccaaccttttcatgattaaaaaccaacctgcgagggaacaagttggttgctccgacgtttgaatggttggtccacgattcccgccgccgtcggcagcatctgcctcctcttgacgcagttttgcgaagcaacttgcagtgcagtgacgtcgtcgtcgaggcctgcatgcccgacacgtggcgctctagcgcggcggcgggctccgcacaagagaggggctcgctgtctttcggctgtcaaaaccgccctgcagctttgctgcttgggcgcattttacacaagaccgcttcaacaaagagcgcccatcggtgggttcttgatcccgggttttattctgaaaagcccaaacgccccggctctggaccggggtttttaaacgaaagccgcccgtcgacagcgcctcgtcacgtgcgcccggtctttgtgcagacggcagcagcgccaccagcattttgctcgccgcgcgccaagcaccgtacagtactgcagctaggggcttcctggcggcgcctcgccaccacgatcgcgttctggtggcatggcgagctgcttgaagtcgggatggcgacggtcgcacggcgattccgatgttggcgccatacgacaacagtaactgcacgtggaacccgtcggccgaagcgtcgaaagcggctaggtcgtgctggcaggctcgatctagggcttcgtccttgcgtctgcaaccggaacgcaagtgctgcttgcgaatatcggtacatcaccgcatgtggaggacgtgtgggcgtagcgctcacagcgtggtggaatcctcgcggagatatcggcgtggacagcagcgcttatcatgtcgtgtcggcattgccgacagtgaaggtatcattttggcagtcgattacagcatgcgctgcttcctgcagcggtagcagcgacaacggcaaccgctttacatgcatgcatcactcttctcctgcacattattcgctctaatcgtcatagccattgccaatggcattttgccatcacctgcattgcaagccaaaacttccgcgtacttccactgtctgcggaggctctgcgtgagccagttggccgcatgttgactcgctgagccggtgtcacccctcggactcgactagcggagccacgcgatctttccgaaacggccgaagtaccgtaaaaacgcacgtcgtttaacaagctgcacttgatggtgccgtcgagagtctcggtcggcacgccgccaccacgagtattgtcgccgcgctgagcttccgccgccgcagcagctctaccagactctctctctctctggtggtgcaggccgacgaggcagcgtcgacgctgctggttcgagtgtttggacagccgggcggccggaacagcagcgggcgggagcaaagtgatccaaatcgcgcgagcaccgctgagtgagcagggctggtggacgacttccactagaagttcgagcaccggcgaggccttggcgagcggtgcatggtgtatggtgctctctgctcgttgctcgctacgatggcgcacctcggtacatgcagcacaccgcgatgtccggcaacaacagatatcgacgggcctggtataatatcatcggccctggctcgcggtgagccagccacactgcaaggcaaatggcggcgggcttctggacatgtaccggataacgaggccatctctcgaagatactgtagccccaggagctcgtcggcagcatggcggcaagaattacaatgcgcagagcggataagagcaccaagcactggccgtactgtacggtgcttggtttcggatcatgctttactaagagtgcccaaggtggggtgtatgtgaggcgtactgagcagtgtaccgacgcgtgtaatcgtctgaaagagggacgcactcctgcagtacgtatttcacgcagaactatggatagatgccaataagtaccataaagcaacgcattgccagtggcactgatcttcgttaatgcacttccctcggcaggggtccccttggcggacaatcgctttacaacgctgtgtacgaccccgcaagattctgccggtcattgcaagtttgacttgattaaagtatgcatcgcctcagttgtttttctgacaatcatggtgcaggtgtccaaggcgctcgcgggcacgagagcggcgctgtcgccgcgggcgctgctcaaactgcaggcgcaagtgcaggccatggtgcgctgcctcaactgccccggaggaccctggtatgagcagcaaccgcccaaatttgatcgcaccggacagcgttgaaggaggagcgtcctccactggtggagggataacttggtctccattctcacctactggttgtgctgctgccgacggcgacgaacagggacgtcggcgtgatgctgacgacggatgaccacgtccagaagctcaaccgcaagttccgcaagaaggacaagcccacggacaccctgtccttcccgttccacaaggtaagcttttagtctaagtggattgactggccatggttgctcaataatggattcgctggcgttgcaggtgcgcgctccagggcgattcccgcgggtcaagaccaaggaggagcgctatctcggggacatctacatcagtccagcgtacgtgcgacgtcagtgcgaagacccggaactcgaagaagtcacgacgctggaggagcgactgccggtgctcatggcgcacggactgtgccacttgatggggtgagcgccgacgctacagcttcagactgtgaatcgcttcgcccttggactgaccgaattgatcgtttatttgttgtgcagatacgaccacgagctggacgacgactacgagcgcatgcagaaggccgagaacttcatccttagccgctacacgcagttcctcccgcctgcattcgcccctgtcgacagtgcatcgaccgcagcagccgacgccgcgaggccagagaagcaacaatcgtaaggttacaggatcagacgacttcaagagagagaaggaagtctatttaaccttagttattagcctccatcctcgacgccgacctccagactctttcttccgggcaccgtcttcgtcgttctcccgatctttacctccttcgcctttgcgcgcaggatcgaaaaagctggaagcacctgacggaggccctacttgcgtacgtgccgattgacggactctggtcgagaacagagagaattagagagatgagagataacccgacgcatgcggaagttgacccaccaaggtggtaagacggctcgcgtaacgcgttcacaatacaaatattagcctccagtaacaacggcaggtggcaaggcagacgacgactaacgcttcctctagttctcgacgcagacctccagaccctatcgtccgggcaccgactccagacagcgggtgacctctaccttctccgcctctgtgcgaaagaccggaaggggtggaaagcactcgttgacgcgctacttgcatacgtgccacacgacggactgtgggcgagggcagagagtacgacagagagagagataacccgacgcatgcgaatgttgaactacttcggtagcgagactgaccgcgaaacgcgttcacaatacaatattagcctcctggtaaagtttgaaccgctttagcagctccggttcgttggtccggcgccagcccgcttggggcggaagcgagctctcttggcccaattccaccttcatggtcgtaagacagtcgatgcaaagctgtagttccagtccctgttcagacgacttcaacctgagcgatataatggcgaatgaatagttttgtgttggtattggcaggtactggcttctccttctatcggtgcgccaagctctcgaggctcgggcactcgtcaaccgaaaggacaaagagctggattggaagtaagtcgatggttcctctaattccggccctcgaccatgtcgtacaccacgctcgtcgccgtcttcatgatcatggtcgtgaaactggcgtgcacgaatcgcgccacgaagcccgtggtgccgaaggtcagcacctggttcaggcctccggcgcggtactgctgccgaaagagctccgcgactgagactttgacgccggccttggaggcctgctggatctgcgccaccagcacgtccatgggcagcgtcacggccgcgctgacgaggccgcccagcagcgacgagatgacctgctcgctcgtcgtgagcacgcgctcggggttgttgcgcttgtacacaaggttctcggcctgcacggagaagaagaagcgcgtggaccagtcggccacgcgcttgaccgagaacatgcccgagcccttcatgagcgcggccacgccctccttgtggatgaccttgacgccgatgcgcatggagcgcgacatggtctcgagcggggtcatgtgctcacggaagacggggtccgtcatcacgcgcgtcttgagcagcagcgtggggctgagcacgaagccctggaagccgccgccgatgccgccggcgatgacctcggacgtgcccttgccgatcttgtcgctgttgaccagcggcgtgagcgccgtgcgggcgatggagtggccccaggcgaagacggagcccttggccacgccctgcagcgcgccccacgggaagaagccgtcccagatgcccacgaggcccttggcgtgcatgatctccttggtcaggtgcacgtacgagaactgcggcttggtctgcttcatgatcttgatgaactcgaggtagtggcccagcgcgaactcgtacgtgaggcacacgccggcgcccacgagcagcttcacgccggccttctcgggcttgggctccttcttggcgctgagcgccagggggctgccgcggtaggcgctgagcgccagcgggtggagtgtggagcggtgcttctgctgccacacggccgagccggtcacggcgctggcgagcgaaggagagagcattgtgcgcggtcggtcggggagggcgaggagagcggagcggcggcggcgggcaagttgggcaatggggctgttggaaggaagaggggggtacgtagcgcgcttggattcggctgggctgaagctcaaagaggatgggcagcggcccagattaagtgggcgcactcggtctttgtatgcgcgtgtgacgaaaagatcgcgacctgtgcggcccagagcgtgtgtttctctggagcggggtgagcaatcgctcggcgcccgacggcatcgggcagcagcacatctcttcctggcctggcagtcggcccgacgcatatcgtgcaatactgtactctatcggcttggggcgtcgggcggagatggcggcgcacttattgcgcagctcgcgatttgcgcaacgcgttcttcaagtgccacgcgcgtgacgtcacccttcgattctccacgcacacctgcccgcgctcgaagctggtggtctagcgccgcgctagggatggcagctgcaagtgctccatccatccattcctttgtactcgcagaggttcttgttgctcggcatcctgcggctttttcggagggtccgcgtgatgcggatccccagtcttttcgaaccgttgcggcggtctccaagcagacaaacggatggtgctcagcgcgctgctgcttggaggtgaaggtgtcggtacgaaggcgagccttgggagctatcccgcggcttctccatcgccgtcgccaacgccgatgcgaccaccgacctgggcgaggtccgccaccaccgcaacacatggcttcagccccacttattccggtcacttgactgcccgcggacgaccaagcagacaacaccagtcgtatctttgcttcaagtcgtcaaatctcgcctgcaagggaaccgtcctcaacgcgcagcgcagccactcaaagcgtccccatcggcatcttcaggcgagacgcgctcgggttctggcgctgaatgcgcgctgctgcaagttgcaggacgcaatggcacgggcgccgctggccgctctcaactcggcgcttccggcggggcgcgaacgctgaagaatactgtagcgctcagtttgcaatagccgcggctggtgatccggatattccagctctcgactcgcatgcatgcagaactgcccccgcgtttctctcggagagcgcaaatcgcgccccatccactgccgagtttgccagcgtgtctccagccgttcttccatgccgggtcgcttgcttgcggcgtgcttccagtctagttttcgcccctggaacctgcagtcaagcgaagaatgtcaagcgaaagtagcggctcgtgcgaggtctgtggtacgcgtggactcactttcctagggtcttagcgccgtggtgtgagcccaagttcaccgtttggtatgtggcgagacgatacatgtactgtcgagctgccagaagaaatcaaagttcccgtgtgtgtgtgcatacgtacacgccagctactcgtgtacgtgtagctgacaatcgcgagtcgagcccctcgctcggatgtgcgctgccgacctcttcgtgaatggaattgcgtcccattgtagggaagttctccacctgaatcggctgctacggacgacaacatcgagagctccaaccaacagcgaccgtcggagctcctcgactctcctctccaccgtcgacgatcgatttttcgctccggtttttcactccggtttttcgctccatttgactgccattgaagcccatcggatcatggtttttgcgagtgtactatgcgctgaaggtcaagctggtagatgcatattggagagctaccagagtctgtgcaacgcgtatcaagtccggcgtcaacgttggtgtcagcaggtatcgtcatttgctaaaggctacgtacacagtctgatttggccaatattattacaaagcttagaatttgtattggctgcccatcaccctacaacgggacgatctggtacaggacggatgacacccagtggggggtactttgcttcgctgcgctcctgcgataaaaagattctctcacctggcgagaacagtgctcggctcgctggaatgctcacctccgttggccctctttcaccccctcccggaaagactgtgtacgtagccattctcatcgtcatttcgcgtacgcggtatgcgcatgttgaagctgactcatgattaagcactgaaaatgcgaatgcgaactggaggacacaccgtgacacggcacacagcctgtgcctacaactgggagtctgctcttctaacgatcattcatagctggagttgatcaccggagccggcaacggcgcctcggcgttgacgtgggctccgaagttggttggtacactgtgtatttacgaaagcgtcaaggacgacagaatcccctccccctcccagcaccaccacccgagaagaacgagtcgccatagctacgcgttgtgaagcacgtcgaggcgcgaagcacgttcgaggataaccgtggcgcaggaaggaaatcaactaactgctgactcggcgataaacctcaaagcaaaggtagctgccaccacattctctacgatgcacgttcgccacgacatacaagaagcacgactcaccaatgtagcttccaaaagtgagttgggatgtgcggctgcgaagccctttcgtggtgctctccggaaccacgccgtttgccgccgtgaaccgctgagctccgacaaacgcgtgggtggggtgctgacgtgcacgcccggcgtcgggagagttcttgtggctctgatcacgcagccgagtcacgacccccgtcgccgtccatggacggttgacgctccgtacatgggtccccacgcgcggcactgccacgaaatttttcccggggcgacgcgcaaacacgcctcgccaccaagcagcagcgctcgcccgtgtttctgcggctgcactttcgctgatcggcagcagagattggccccgcggcaccgcgctgggtctgtctcacgtcgatcttgacgtcaaagtcgatggtggatccgctcggatggatagggcggcggcgagttccgcgcgctgcccgacaaggcgagacccaacacgcgctcgcgctgggccggccgaggagctcacttctcgattcgcccccttcccgatacgatgatctccacgctccgcagcgccgccttccgccggacccaagcggccgccgcccgcgccgccatctcgtacgttgcgtccgagaggtcctcgacggcgctgaagaagctcaaccacaagcggcccgcgagctccgcggctgctgaggcggtggccctcgacgaggaggtcgaagacttctccgcggtgcgtggcacacaacggtctccttcggtatgaggctcggaccgatgtcaacgactaacgaaccttgcttgttgtggtcgagtgcagtcgcagccaggcttcgcgctcatgcggacgccaatcgccaacaagggccaggtcttcaccaaggaggagcgctcggccttcaagctgcgcggcctcttgcccgaggctgtgacctccatcgagctcgagacacagcgggccatgatgcagctgcgccgtaagacgtcccccatcgagaagtacatttttctgcagagcatgcaggacaccaacgaggacgtgtactaccgcatgctcatggagaacacggtcgagctcctgcccatcgtgtacacgcccacggtcggccaagcctgccaggagttcagccacatctaccgccaaaccccgcgggggttgtacatctccatcaacgacatcggccacgtcgccgagatcctggacaactggccggagaaggacatccgcgccatttgcttcacggacggcgagcgcatcctcggcctgggcgaccagggcgccaacggcatgggcatccccgtcggcaagctgtcgctgtacacggcctgcgccggcgtgccgccccagatgtgcctgcccgtcgttcttgactgcggcaccaacaacgaagagtacctggccgacccgttctacattggtctgcgccagaagcgcgagcgcggcgagaagttcgagcagctcgtggacgagttcatgaacgcggccaatgccaagtacggcgacaaggtgctgctgcagtttgaggacttcggcaactcgacggccttccacctgctgcgcaagtatcagaacacgcactgcacgttcaacgacgacatccaaggcacggccgccgtcgtgcttggtggcctgctggccgctgtgcccctgtcgggcaagccgatctcggagcagaagtttgttttccttggtgctggcactgctggcacgggcatcgctgatctcattgcattggctatctctcgcgagactggcaagacgatggaggagtctcgcaagcagatctggctagtggactcgcgtggtctcattgtcgagtcacgcaaggagtctttgcagccgcacaagctgccgtacgctcacgacgctcctgaatgcccgagtttggtcgaggcactcgaccgcatcaagcccacggctctcatcggtttgtgcaccatcgccaaggcttttaatgaggaggtctgcaagaaaatgagcgagatcaacgagcgcccgatcatcttcgcgctgagcaaccccacgtccaaggccgagtgcacggctgaggaggcctacacgttcacggacggcaagtgcatctttgcgagcggcagtccgttcgaccccgtggagatcaacggcaagctctgcgtccctggccagggcaacaactcgtacatcttccctggtgtcggtctgggtgtggtcgcggctggcctgacccacgtcaacgacgagatcatgatcatcgccgccaagacgctcgcaggtctcacgacacccgccgatctggagactggctgcgtctaccctccgctctcctcaatccgggaagtgtcactcaagatcgcagaagccgtcgccgaatatgtacgtatccccttcctccttcctcctgtacttacgttggcggagctgattaacctgacgatggttgtgtgcgtgttttgtgtttgcagggctacgaacaaggtttcgccaccgtccccaagccggagaacatggcccaatacttgcgcgacttcatgtacaacccgtgagcacatgtatgcgcgcggtagtctgccgcgacgtagctgaagtactgcatatggcgttaagtggtagctgctgtcacgtggacagcatgtattgtattcccgaaaaatgcactcgattcccccacaaaacgttaatgaggtgcttcgtctttatatttcatgatgctattagtctgccgagagagcgtcgtggatgtccaagaagtacggaggtacctggcagaaagcagcgaaacgagcagcaaccaccttcacgtcgtcgaagtcagtattctgcaaccgagagattgcacttcgcaccgaaaactcgtacgtttgcgcggataactctctgacggtcctgacatgactgccatcgccactcacatctgactcactggcaagttgtgaagaagaagaagccacagcctggtccaatccttcaccgtcggcgtgggtctccactggagcctcttccagtctagatgtcaagcaacgtaatttgcgcgagctcaactcgtcgcgtgcgttctgagcaaccataataaggaacgcagaagcgcttcgacgagctacgacatgcgctcttgctcgtgccgcaatatctcgtagggatttcatgcagtgctgctgcctcctggcaagaacgcgagccttttctgcctttagcagccactcttctcgagctcgatccttcttagcacgaccgcgaggtgagatcgactcctcttcgctgggctgcaagtcgggggcgctttgggtgcgttcagccaatgcagattgcatgtgaggagggactgccgccgtagcttcgtcaccacaagagctgaggttcgaggccacagaggaggtcctctgcacttctgcggcagctcgctcgctgccttcacgcatccattccgagacgttgtggtgcgataggtatgccatgtcatgccggatcaggtcgtcaatcattagcttaacttgcaccacctcccctgagctcagcagtgccgcctccacttggtgctgttcctcgtacgcgtccaggaagccgccatacttaagattcgcttggccttcctgctctacccagttgctcgcggaaatgttgagagaagcctggactgcttcatcgtccacttgagaggcactagctccagcgataacccgaaggacgttcatgaagctccctcggctgaccaagcctctctgttgaggatccagcttgtgcaaaatgtccagcatattgattcgagcctcctggcaacgcctcaccagaatctctagcagacttggtggcgatgatacatgctcgtccgtcgatgtagcaactgttgctgtctctggtctaggcgggggcacgatattcactggattgtccgcaccagggacccccgctgtatcactaggtgtgacgctgacttctgcttgctctcgtttcaccgctggggctttctttcgtcgaggagcaggcggttgagctactggcgtcgtaggagcaaccggttctcgaggtgttgggaggtaaactctcggtgatacaacctttggcggagagcggcgcagcgtagccgccgcgattgctgcctttctagcctcttcttctaccctgtgggcttctactgcgctttcaagagcttttaagccgtctgctgcttgagggtatttatcctgaatcgactcgaagtgcgcgcgtgcttcgtcaaactcaccggccgcagtaagcacgcttccgagtttgtaaatcgcgtaaggatcgttcgggttgagctccaacgcgagtcgaaattcgtcaacactggacggcaggtcttcggctgcttcgtacgcgcaggcaaggttgattcgcagtctgaagttcacttcgtcattggtcgccgatgtcaacgcgagcaggtacaactcgatagcccgctgcagttctccttttgagtgcaggcgcacggcagctttcgtgaccatcttcagtttttgagtcggttcaagactcgcatggttctgcggtaacgaacgccaccaccactcgaatccgctcacagagttgatgcactcaggattccacgagtatttttcagacacaacgagtcgcttgcttggactagtaccgctcgggctttgaggcggtgacccaaacagcggatcaagagttctgttggcctccacgtcgatacttctctcaagccgagtaggaggcgcgttaggcgtgttgcatcggtactgccgcgggccttcgacagcggcgagctttggcatactgaaaatctttgcccgtctggtctgttccactggagaagtcggagggcgcgtcagcggtagcttcatcgaggggcagtacggagaaggcgcttcctggtacagcttggatatcgttgtcgtaggcgagaaaagaggtcggtgcggactttgactcctgtggcctccagtcaaataaggaagcgcgatgttttcccccgacgcccgaaatggggacagcggggccgtggcaatccgcagtgggctagcgtcgcctccgagacgagcaaacacttcccggtcttcatcatacgcttggtccaacacgatcggcggagggatcggcatttccaccgaaaaacactcgagcagcctcgcggccagctcgcacagcgtcgagttgtcctggtgccgcttctgcaacgaaaagacaaacatgttgggctgccaaaactgtccctgggccgcaattttgcatgcgttcaccaccgcagcactgtcctcttcggcgagcagcacgagaatccgtaaacacggaatctgcagggacagcagcaacgagtacaacgacgacaacaacgttgcaacaacaagcatcgtcacatgtcagtcgtacacaaattcgacctgcagagggtattttttctactgtgtcgtacacgcttctgggtctccgtgaactgcattagcatcctgaaaacgcagccagcgaaacctggtgcaaatacacgcagccccactatcagcccaaaacaccaagtaacttgtatgaatgctttctactccatccgaccgcacctgaccgaagtgcgtgcgctcgaatcgacgcgcagtgcatgagctcccaggcctcggccagcagatcctcctacgataggcagcagccccaaagctgttggtgacacaatcccacagtcaatgcgctcgcttgtttgccggcttcgtaccaggttgttgtgcgggcagcggtcgatggaggcggcgaacatgagcgcggccatggggtccacgacgcacgtggagaagggcgactcggagtgcgccacgggcgtcgagcgcagccgctccacgaccgcgtcccggtgcttcttgatgaggctcttggcctgcggagacgcggcgctcgtggtcatgcggctcttctggaagaaggcgttcatccagaggctgttgcgcgccagcagcgccggctcgacgctgaagctcgggtgcaggcgcgcgtagcggcccagccagcgctggttcgcgtccacgagcgcctcgaagacgccgtcgccctcgacctccgcgtccggcagctccagctccagcagcggcgcggccatggcgggcggacaaggcaactcaatactgaagtttcctttttcgtagcagaccacttcaacttggcggctaaaattagggatcggtggttaggcgtcaaaaactgcagtgtttcccttgggggcggaagctgcagttgcttcacgctcaaaggcgaagcagccactgcgcagtgcagacaatagttcatcacccgctggccattgcattgcggggcctcgctacgcaggtcgctgccgagacttaagtccaaggtctgttcatcctggctttgttacagccgacatagtggatgcaggcttagcgtgccggaaagacggcgccgttcgggattgtgtcgtcgtgatctatttatgcatggggcgggggaaagaaagcgcgggccttcgattcagtcggtcaagcgcacgcccgagcggaagaacctcagctcagcgcccagacgacaatcactccggccatggagccgccctccgcgtcctccgcgcccgcgtcggcggcggcgcccgtgtccgcggcggagctgccggcgcaggggcgcgacctgctgctgggcgcgctctcgaacggcagcactggtgcggcggcgcccgccagcagcagcgccgccagcaacgcccacacgaacctggacgacctgctcatggactcgtccgcggcctcgacgcccgccgccatcacgcacgaggtgcactgggagggctacgtgcgcaagaagggcgactggctgccgcgctgggaggagcgctacctgatcctggacggcgccacgctcacgtactacaactcgaaggaggaggcccgcagcgcgcgcaacctgcgcggccgcatgatcatcagcaaggtgcggcccgagaactacggcaaggcgcacggcttcctgctggagacgcagggccacaagcacttccacctgtgctgctccacggagctcgagaaggacatgtgggtcgagatgatgcaggccgccatcgaggagggcgtgcgccacggcgcgcacagccgcgtgtccatggagggcatggaggcactgcagatgcaggcgtcccccacgcaggtggacctgcgcggcttctacttcgccttccgccagctgctcatctcgcactcgtcgtcgccgcagttcttccccaagctgtcgcgcgacgtggtgctcacgtccaactacgcgcccacggtgcccttctggggcgagtaccacggcctcgacggcgtgctgcacttcttctccatcctctacgagacggtggagatcacggccttctttgtcacggacatcgcccaggccaaggagggctgcacggccgtcgtggccggcagggagaccatgaagaacagagacaacggccgcaagttcacgcagcagtggcagcacacgatcgagttcgcgcccgacggccgcgtcaagagcctcaccatctcggcagaccctatcgcggcctcggccgtcttcggctgcagcgccacgtccagtctgtcgctgcccatggccgcggtggtgggcaacacggtgcacgacaacccgcccggacggctgcacgtcgtcgtcttccgcggcgaacagatctcggaccaaggcttcatcgacgacgaagagcagacagacgaatccgaggcggacgacgagaagcgcccgtccaaccgacgggtgttcctgggaatgcgcctggttacggacggcaagaccaatgtgtacgcgccgacgtcttcctcgaactgcgtggcgaggacgcgcatgtgcgaccccgatgaggcgcggaaccccaagtggaactcgaagcacgagatctcgtttgctggatcttcacgaggcaagccctgcttcatcctgattgaagcgtgggaggttgtggacagcgacagtggcacggccaaggcctcggagcgtgttattggtgtggccaaggtcaaccttgctcctttcctggcgctggccagtacgtcgcgcacggtccgggagagtgttatccactcggacattgctcgtggtgctgtgccccaatggtacacgctgctgtctgcgaatgaaaccaagtttacgtgtggacgcgtgcagctcagcattagctttgaggcttccatggcctctttcgctgccatgtcgcgttctaaccttgccagcgcgtcgagaaatggcatcgatgaagaaccacccagtttggaccccaacgcgccaacaccgcaggttcgtccgtctggagcggtggttcagtcaatgagtcatcgcgtcgctttggctcgtggctgctccttccgcgatacgaagcggaacaaccaccaattccgagtaggcaacacgaactttgatgtccccaagcgctatcagatgatcaaggctgtggggcaaggcgcatacggctgtgtgattgctgctagcgacatggagacgggccaagctctagccatcaaaaacatcccgaacgccttcaacgacctcattgacgcaaagcgtattctacgtgagattcgactgatgcgtcacctgaatcacccgaacttggtaaatctgctggacctgctgcgaccgcctacactacaagagttcaacgatgtttatatcgtgacggacctcatggaaactgatctccaccgtgtgattcactcgaaccagtcgattagcgatgaccacgtgcagtacttcctgtatcagatgctggtggctatccactacgtgcattctgccgaggtgctacaccgcgacttgaagccgtcaaacattttggtgaactcggactgcgatttgaagctatgcgactttggtctcgctcgcggtatccagggtatggactcgggcctaacggagtacgtggtcacccgatggtaccgcgccccagagctgctgctctcgtccaagtacgacaagcaaatggatgtgtgggccattggctgcattctggccgagatgctaggacggcgcccgcttttccctggtcacgactacttgcaccagctgaagattattatggacgttgtgggctcgccgtcagaggactcgctggatttcatcaccaaccccaaggcgaagcgatttattctgcgtcaacccaagaaaccgaaggtacctctctcatcggtgtacccccgcgctacgccgcagtgtctcgatttgctggagaagatgctggtgttcgatcctcgtaagcgtatcaccattgcggaagcgctggagcacccgtacctgagcctcgtgcgtgatcgatcattggagaagacgtgcccaactccgttcgacttcgcgtttgagaacactgatctgactaagcagaagctgcaggaactcatctttgaggatgtctgtgcgttccacccagatgcacgcatccctgacccggtggttccggttgcttcaactgccagtcgagctcatggtttctcaagggctgattccaccttggcgccagtttccgacaaatccaatgtctccgtcacggctgcccctatcgctgcgtctgcggtagccgcttcggtggccgtaccaccggcgccggtttccctcgtagcacccggaagcctaccgcctccagttcagaaggttgatgcggactctcagcagccccaagtccaagctagaccttcgccagtcgtattactgcccccgaattcggtttctatccatgaagctcggccatctgagacgcctgtagacgcggtggcctccccaacaaccccagagaccgtgtctccgtcggtccctgaaagtgcaccgacaacagtgcctgcttttatgccaccgatgccgacagtatcggttgcgcctttggagcaagtgccagcttcagcgcctgagcacgaacgaagtgcccaggcagaagttgcgatcgagatcatgcagacgcctgcccacacaactgtggtggcggttgaggaagcagcagaagaggtgtctctcgacgatattggcagcacccccattcacaatgtatcagtagcagaagctgccgccactgtcgaggagaacggtgcgaccgacctggacgcaccgaacagcacaagcactagcagtagcggcagcgacggtgaggatgatctcgcaaatgcccaggagaccgatcgcgagatcgatctgtcgagttcgccgaagaagcaggtgatgcagcaacccaaggcggttcttacaccatcgtcgttggtgtgagcgcccaagtccaagaggtgaagcctgccgccgtggccacgtcgagagcgttgctctcgagtcatccatccctggccactactgcacggaacaagcgcgagctgcgggttgttttcaccacacgcgcgcctccgtatacgcacgagttgggatccgacgttcgggcttgaagacgatgtgctaagacaacgagcgcatgctcgacgagggcgatgagaagcccgagtgaagttgccactgaataaactgaaaagaatgcttgcgcgattgatccttttgtcttcttgccgtgagtggctccatgctcaggcacttgtgcactttcagtcttcatcctcggagttcagaccaaaagcagggcggacgtctgcatgggagaaagctttccacgagaagcgagtgttgacggggggcttacctcaagtagctggcctggaagcattcctcgggggtgggttcctgaaagtttttacaagtggagtcttcagttttggcatcctaccaagttcttttggacggtgaacccgcgactccggacttcgttttcatgctggactctgtgtgtgtagttcgtggagaggagcagggcccgaagcctttggtggtggacgccccacgattcaggaagtttgacgaggtgggctggagcctcggtgcaccgagtcggtgggctattagatcgaaactcgcagcgtgcagtgggatgatttcgagaacacattgtgttacgcaacagcattcaagaacgagctcactcatgcagtcccgacggctcatggagttgaagaatgaatacctagacacggcggaggaaaagagtttgccaggagaaaaattcgaccccgaagaaacgaggacagcaacaagacgcaacgaagcgagtagtgtgggtgcaatggatataaatgcatatgtactgtgtcggcaatgaaaacatgatcgtcttctttcctcttctttcttgaacgctcggtacaggtatctattgcgccagcctgcgaagcacttttgccgtagtggcagtgtttgcacgtggaatgacatgagactgtcgaatgacgtttgcgtaaagctgaatcagctttgagctcgccgggatccgccgcagcccctgcatgagcacaatttcctgccgaatctgactttctcgcggctgaagcagcatggggcagctcttcccgtagtagacctgcagcacgtccctctcctgcaaagtcgccgcagagagcgatctcgaatcttgccacgccgcaacaaacaccgccttccagtcgatagcagccttgtcggtcttcacactgcagattctggttcgccggagtattagcgacggcttgttcacgtagccgaagtgacgagccacgaacagctcccagagctcggcgcaacttgaaacatcctgctgcagacgccggtttacaagactcaagcgtgtaacgctggccacgtccaggaactgacacacgcgatgctccagcagctcggacggcagctccagtagcagagatttggtcatctccctggatgaacagaaatgaatacaaccgagcacaatacatcaccggcttggcaaaggtgggggggggcagaggtggccacctgctgggcaacaaacacaccgaaaaagaggctggccgccgtctattccatcgcaataaaaggcttacacgaaaggaggaggtccctaggcgtgcgggttccgcagcacgatgatgaccgagtctccgcgcaggaacattttgctcacgaagcggtccttgttgacaggcttggccgccttcttgcccttgcccgacttgggcacctcggtccacatctccttgacgttctccagcaccatgttgcagtggcgatcgaaggccttaacgcgtgccagcagcttgtggttgttgcgcacgttgatcagcacctgcgagttgttcttgacgctgtgcatgagcaccgatagcgggcccttctggaactcctcctcgtcctcctgcacgcgcttgaactcgctctccccagtgctgcggcgcgcggttggcagcaaaaagaccacggttaaaatcctcattcaagtgcccatcgggccggctccgtggccgcgatcatcaatgcctcaacttggcgggagacccccgcgcagacaacgtacctcgccatgatgctcgcgctaatttgttacttggagccgctttggatggttggagcttttgggatcgtacttagtgcgacaacctctagacaaggaccgcgtgcgataacgctttcgacattgagattggtccagcttccctggtgttagcgacagttgaggtgtcaaacgaaaaagattgtttctgtatggatggatggttctaccgggatcattacctaagcacgcgtgctgcctgcctgcctacctgcttgcctgcgtgcgcgtctacttcgagcgcatgggggcacaagcagcaccgtcatatgcaaaatgccctcgtctccgtggtcggacgcacttagtccaggtccatcttctcagcctcgtccttctcgtcggcaggggcggactcggcctcggtcggctcgggggcagcgggcgtctccaccttcggcagcggcttgggcttggtcgtgatcggcagagccacggcgcgcacggccacgatcttgctgcggatggcagccgacgtgatcacgggggcgtccgtcgggccaacgtcggcctgcttggtcagaccgtcgaacagccacgtctcggcgtccacgcacgtctggcgcagcttggtcttctcctcctcggtccagtgcgagtacgcgtcgtcgcccgagttcaccacgcgcttgtactcctccagcacggccgtcagctcagcctgagccacaccgcgctccgtgctctccgtcagacggaactccacgggcgaagacagcttgcgcaggtcgtccagcttctgctggtacaccgacttggtgctgtcgaagccctcgtccgtgtacagccagtcctccgtctccatcagcttagcctcgaggttgcccttctcctcgctcgtgatgaaaccagccagcttgtccgtgatctggttgcgcatctcgtacacgaagctctccagctcgttacgcttgttgaacgtctcctcgatgacgcggtcctgctgggccatcttcagctcctgctccgtggccgtggtcaggtcggcggccgacagaccaccaacctgcgcctgcacggtcagctcgatcttgcggaagcgcttcttcttgggctcggcgggcttgtcctccttcttctcctcgccctccttcttctcctcgccctcagcctcggcgggcttctcctcctccttgatctcctgcatcagctgcgacgacgcgatcgagaacaggccgttcatgtcctgctgcacgttcacgcggatcttggggatctcggcaccggcctcctgggcgggcatgcccgagaccgtgaacttgccaatgtccatcacgtagtcaggcggcaggtaagccttggccgactcgtcgtacacagcgtcgatcgagaagggcttgtcgcggcggaaggtgatgcgcttggtcttggggtactcgtccttgcgactgaggatcaccagggagctgtcctccgaggcgggggtctccatgttgacgtcctcgtcgtcgtcagcggcgtccgtagccgtcgacgcgctgccgtcccacgacacacgcacgggcaggtgcacgcggtccgtgacgctgaactccttcaccttgaacatgggggacaggatggcgcagttcagggcgcaaccacgggcgaccgactcgtcggcgttcagcgtcgtgctcaggccatagttctgctgctccttgtccaggccgagcacctcggcgaggtggcgcttcacgctggtcacacgggtgcctccgccgacaatctcgacgttggccagctgcgacttctccacaccggcgtccgcgagcgcgcgctcgatggggccgtccagacgcgtgaggagcggggcaatgagctcctcgaactcctcgagcgtcacctgcgagttgtagtcgcggtcgtcagccaggcactcgatgttgaggtgcgtcgccgtgacaccgtaggggctgaggttcttcttggccttctcacaggccgacagcagcttgatgcgcgacttggggttctcaagcgggttggtcttgtacttggcggcgaacttggccgcggcgtccttggcgatgaccatgtcgaagtcacggccaccgaggaagcggtcgaaggcggccgacttgaccgtgaggcggccctgcacgaaggccacaatggagaccgtgtagctggcgtggcccaggtcaatgaacatgacgtgctgcggctccgactcgtggaagaggttgcgggccgacttgtagatgccgtaggcgagggcgatggccgtgtgctcgttgatgaggcgcaggcagttgaggccggcgatcttggtggcgttgagcagggcgcggcgctgcacgtccgtgtagaatccggggcacgagagcacgcagtaggcggggttgacgccctcgttggcggcggccgcgatgttctgcatcttgttgaggatcatggccaccacctgctcgcacgagaaggttacgggctcgtcgttgtagttgagcacgatgcccacgtcgccgctggccagctccacgcacttgtacgcgagctgagcgatctcctgctgcacctccgggtgcttgaacttgcggccgatcagacgcttgatgtctgtggccgtgttcttgtagtgcatgcgcgccatgctgatggccgcctcgccgatgaagcgctgcttgccctgcacgcacaccatgttgctgtaatacccaggaaacgggcagaaggagttagtggccgggccatcagaaggcgttgacaatgctcagggccaaacaggcgcgagcgagtgagtgagtgagtgagtgagtgagtgagtgagtgacgtacgggttctttctgttggagttctcattgaggataatgtcgatgccgccgcgcttggcctggccgatgacgcagtccacgttgccaaagtccacgccgatgaccgacatgattgcagagaaagagggggtcgagagctgagcttgcttctgccacggagccgccgaatcgaagagtggggctcggattaggggggggttaaggtcggcagcgaccaggcaattccagaacgcacctaagcgggggtcaatgccttccacaccacatatcctttgatatcatctaccggattttctcacaatgactcgaatacacctctggtatccgatatcccgccaaagcaaaaactcagccggccacgtgccgtagccattcgttgttgcggggacgatctgctgcgggggctcgccgcagtggaggcgtgctggcaaccaggccgcctccgcgctgtaagctgcagccgcatgatgatggccgagacgcgcattggcgttgctcgtcgccggccgcaggtttttccgacgccagcacgcgctcgagaaggttctcgaatggcgagagcgcgtgagtgcgtttgaggtggctgccgtttcgcggcctgtgcccccaatcacctgctgcgtctcggcttcccttgctgtgcacaagacaagccaccagcagcttcacttcacttgcctccgaagagcttccgggcccaggcctccgtggacgcgtcgcggttgtggacctcctcgccgagctgcttgttctcggcgtgcagcttctcgaccacggccttgctctgctccacgcgctgcctcagccgctggccctgccgcttgagcgaggcctccgtcgcctgctgcagctccagccgcgtgcgcaggtcctggaccaaggtctggtgttgaagctgtgtttcggcggcgcgctgctgcatctcgtgcgtccgtgtcgcggcctctttgactgactgcttctcctgctgcagagccctttgcagcgcctccacctccttctgaagctgcttgcgctcggacgcatggtgctccacgctgagtgtccccttggcggccagctccgccgcagcgcattgctgccgctgcagctggtcacgtagaccggcgacttcgctctgtgggaagacagctcaagagcgttagtccctgctgtgatgccgcagatctgtctgctgcggttcgtacctgtagagcgcgcgcgttggccttctcgtcaacgacggcgcgcagagcgtggtctagctccctctccagactcgccactcgagaatccgtgtcgcccttcagctctgcatacgccagcttgcactgcatcacctcgtcgcgcgtagcagagttcttgtcccgctgcgactccaagtcacgggccagcctcttgtggtggcgcaggcgggtcttcaacgcgactatgatccggcaagcctcctcaagtcgattcttcgcgtcgtcgacccgcttctccacttctgccttctcacgcgctgccgcctcgagcttctcgctccaccgcaactcagccaggtcgcgctccttcgcctcagccgctgcctcgctctgctgcagcttgagctgctcgatgcgttgcgtaagttgagacttctcctgctcgctctgcgtcttgattgcggccatcttggcctgccacttctcgtcgcaccgctgctcgaactcgcgcatctcagagtggtgccgtcttcggatctcctcgagctggcgctgctgctcctgcgctgtcgtggccagaatctgctcgtgctccgctagcgacacgcaggagcccaccacgtctcgcagttggcgctgcagactttgcacctgccgctcgtgctgggcttcctggcgctcgagtctctgctcgcaccgctcccgcgtctcgtcacaaagctcctgcgttttgcgcttgaacgcagccatcagttcatcagggtacgatgccctgccactggtgtcgtggtggtggtcttgaaccggttcaacttctgggcagaccgctcggaaacctcgctcgctattcactaatgccgctgcacgcgattgcacctgcttagccctggagctgcgtgctaccgatgaatgcaaggaggcgttcgcttcgcgtccacgcttcatgtggttgtcgatgggaatgggaagataatagaggaggcgatggcggttgcagttatgaccatcactcctgaaaaagaaactttctggccaacactcttgaaaaaaggcaactactgcgcatttgacattgagacgtttacttacgctaataatgagtacaagactcaatacgtattgctgctaccgcggtgctgtctgttcagttgaccgcagccgagaacgaggatacggtcatcttggcgttcgtgcccacgaacggctccgtgccggcctcgagcgtgatgaggtactggctggaaggcaggccctggttcttggtgaggtagctcaggaacttctgcaggtcggccgagaagttggtgatggtcttggtggcgacgaacgagaagacggtggtgctgccgttcgggcccttgtacagcttgaagctgttgctgccgatggtgacggtggcgatggccttgcccgtgctggagatcgggccggcgccgccgtacgcggccagccagatcatgatctcgtactcgttgctgccgctggcggtggagctcgtgaacaggtcgtacgacacgtcagcgacgaacgtgcccgaggagtgcgagtacgagtacttcatcttggtggggatcgacttgatgttcttgatctgcttcttggagaagaccagcgcggcgttcgagtacgacttgacctccgtggccgcgcctcccgtccaggtgtacgacgtgtgccaggcgatggtggagccgctgatcttgtcgacgcccgtgcattggctgcccgatgcggcggcgttcttgttccagaggttgttgtacacgatgtagttagtgctcttggcccagtcccactggccgcagtagtctccagcggaggcgaccgcgagggtggcagcagcgacgacaccggcgaagaatcccttcatggtcgagagtgtggaggaagtggttggagtggagtgtggttgagtgggtcgaagcaaaatgcaaagtgaggaatggcctctacctcccgctctccagtcggtcggcccgcgaaagcgaaagcgaggctccccatcgcggtgaacacacggaccgacatcccacgctccagccgttcgagttgcctttgcagtatcgtcgatcgcagcaggacgcgcctcacgcagagagcagcgtgttgacacgcacatggcggactgcaacatccatagcgaggtcgtgtcgtccagctgtggcgagcagagcgagcccatttcgctgcatcacgtcacccatctcgattcggagctccaaggcggtgaagagatgggatcacgccgattttgatagagacgtcgcttggacagggggcggcttcttcgcttcctgcgcagcgaccccaggccgtgctttggcttgccaatgtcgcgtcgtgcgggcaaccgggaagaagagcagcctctactcggtggaggcagcactggccgcgatcatccgacgacagcgggcaaaacttttgcgagcacaaagctcccggctcatcttgcacgaagatctcaagtgcacgagcaaactgtgctaaagcacctttctacaataccttcgcctacgaagtatcttggcgtgcgagagattcaagtgtatggaggctaaggaacttgaacatcctggcgtcaagacgtcaaggatggagcgagttacaaacattactgccactgcaacaataggatgtgcccaacacgtgcaagcaggggtcacgtgatggctcacaacatgtagcacaatcaacatccttactcattgagtgatggtaaccacagttacacgtgatgatgttcggttattaagcgctccaacgtgtccctcaggctcgagcaagatcgtcgagggtttgcttaggcataggacgcatacactagtgtgtgtgatccgtgtaactttaagctattaaagctaagtcaacggaggtcattgaaatgaaacgtgagtacatattaaaaaaatatcgtcgatttaccacatattgtaaaacctccggcgaaaggctgacgcggctagctaaaaggaaggtgctgcaggagaattaggcttgcaaattgacagcaataccaaagttacgaggaaacgcgttgcagtgacgtgcttgggctactcaatgagttggttgccacatacttgatcaattaacccaccagactagtcatttccctgcggatggagagaagcgtagcgttttcggatcggtggtccctaacgagatgcttactgcctttcaatttgtttttatactgattttgtgagttcgtctggcactgttgctagatgtacagtatcactaacgcctgttacctacctactagcattccaccacaggcgcgaggaatggtgcacaaattattgttgtagttattttatgagctagcgtcgagaaatacgagccttcttgcatacttcgcgttgctgctcttggtacatgtattgttctgagtttgaagtggccgatgccatccggtaacaaaggcgggtagggcgcaagtgcggccgcattttcagtctcaagttgagactctcaaccgatgcggccgcatggtacaaaactgtgcgatgcggtgcggccggttgactcaaccgggttgagaatgggcctgagctggtacgccgcagagctgcctgaagcagaccttggcacaaagtcagcttcgggcctccatcactcaagttagtcgtgccaagttctcaagaaatctgtgaattacaacttcatgtgtaccaccaagcacccggagcaacttctgtggttcaaacgacgctactttggccagtagtgtagcggcaagccgcgcagtgatcacggcgtgacctctttctcgactcgaggtgaaatcagtcgacaatccaggtgctggcgctggagaggcaacatcgacgcaacgagatcacgagctgcatacggtacgcgccagcatacgcgcttccagccagcctgggtgtggtctccatagagcgccattacggcggcgagggatccatcagaatggagcgaatgcgcgtctgcccttgacacacttgacgcgcgaaaccagctggctgtagacgtatgtcaccgtgaaggaccagggtgtcaggtgtgcaccgtgtcaaggacacccgaacagaggaatgccggccaccgcgctcacgaccgcggtccagcgatctggtccaaggtgcgcagtgacctcgcgatcgccactgtgctgcagtgctcgctcgatcttcaccaacgagctcctcattcaacaatcttccttgagcccagcaagcttcgccgcccctccccgaacaccaatgccatgaagagctttctccaactcgttgtcgtcgtcgccgccttgctgtccgtgtccaccgccgacttctgcagtcagtggcgtctgtccaaggccggcaagtacgtgatctacaacaacctctggaacaagaacgccgccgcatcgggcagccaatgcacgggcgtcgacaagatcagcggctccaccatcgcctggcacacgtcgtacacctggacgggaggcgcggccacggaggtcaagtcgtactcgaacgccgcgctggtcttctccaagaagcagatcaagaacatcaagtcgatccccaccaagatgaagtactcgtactcgcactcctcgggcacgttcgtcgctgacgtgtcgtacgacctgttcacgagctccaccgccagcggcagcaacgagtacgagatcatgatctggctggccgcgtacggcggcgccggcccgatctccagcacgggcaaggccatcgccaccgtcaccatcggcagcaacagcttcaagctgtacaagggcccgaacggcagcaccaccgtctatcaaccaccaggccttccactcagtacctgaccacgctcgaagccggcacggagcccttcacgggctcgaacgccaagatgaccgtatcctcgttctccgccgctgtcaactaagtcaacgacaactaaagtgaatatgaatgattgatactcgtcgccactggcgttcggttcgatgatcgactacatttgcagcgaagctttatagcgacgctctatcctgctgtctcccacatcgctacgggcttaaatgctcagggtgctggtcgtggggcaaccgcgacgcagcagctcggccaccagttcagagcgcggcaccgtcacctcgtccttggacgccatctccttcaccttgacgacgcccttggccagctcgtcctcgccaatcaccaccatgtagggcgtgccacgctccagagcgtagtgcagctgcttgatgaacttggggttctccgtctgcatcacttcggccgagatgttggccagccacagctgcttgcacagctccaggcgcggcagcatcaggtcgttgctcgtggaggcaaccaggacctgcgatgggggagccgcgttggccgactgcttctcagcgtgggcctggaggataccgaagatacgctcgataccgagactgacaccaacgcacgggatctgctggtccgtggcggagaacatgcccaccaggttgtcgtagcggccgccagcagcaatggagccgacgtggtgctccgggctcgtgagcacgaactcgtagatcagacccgtgtagtagtccagtcctcgggcgagactcagatcgaacgaaatgtagtccaacacacccatggcctcgaggtagttgaagagcagcgccaagtcgtccatggcgcggcgcgcgttgacattgtcaccgaacatgttctccttcaggagctgcgcgtgaagctcacgcggcgagcccaccttgcacacgaaaggctcgatgcggtcggccacagcctcggggatgtccttctcctccaccatctcgcggcgcacctcactccacggctccttgtccagcttgtcgatagcgctgcacgtagtgcggaacttgtctgcgggcacaccgcagatagctaggatggcatccagcaggaggcggtggctgagcttcaccttcacaggcccaagctccgggaactgctgcagcacttcaatgccgatggacagtacctcggcatccgggagcataggcgcgtaggtaccggcgatatcgaagtcgcactggtagaactcgcggaagcgaccgcgcgccatctgcgggttgtcgcggcggtacacgcgcgcgatgtggtagcgcttgatgttgccagggctgtggagggccatgaagcgagcgaacggcaccgtcaggtcgtaacggagcgccagcagttcaccaccttggtcggccaagtcgtaaatgagcttgctgtcctcaccgtacttgccggtaagagtctccttcagctcgaagacgggggtctcgatctcaacacccgcgtggcgcttgaagaccatgcggatcttgttgaagatcttctcacgcagagccatctggtgcggcaggaagtcctgcgagcccttggcgatcttgggcttgcggcgagcaccaccgctgccgagacgcacaaacagctcctccaggaacagcgagaagctcgaagcgcgcaggtcgaacgccgatttctccacgctggtctgccacgcgtcgccgagggccagcaggtgctgacgcacggcttgacttcccagtccgaccttgatctcgtccttgctgctcttcttggcgctctccttctccttctgcttctccagtttcttgcgacgcttgtccaggatcttgttgcgctgcgcctccggcatggccgcgagcttctcgtcctccttggcagcagccgccgcagccttggccgccgcctcctgcgccttggcgttcttctccgcctgacggagcttcagctgggcctcctcctcctcgaagaacttgaacgcgggaacgagctcgcgcgccagagcagccgccgtggcgtccacaagctccacagcgtcggcggtctgcggtgcgtccgtggccgtgctgtccagcacctggagacggtcgacactgccctgcagcagcacgaggagcgcctccttcgtagccgacagcgccgtcttcagcgcctgcgggtggatgcctgcgccggcgcgcttggcagcggcgctgtcgcccagggcgccgttgatctcggcctccacggccttgtaggcgaccagcacggcgtcgcgcgcagggccgtggtactgcgggatgcagcgcacggcggctacgtcggtggcgccttccttctggctgttgatgaacttggatccgtccagcatgagccgcaggttctgcgccgacgtgacgataccgcggtgcgggcgcgcggcgtccacgaactcggcctcgaaggcggcagcatcggcgcgcagggcctcgcacgtgacggcggccacagcgtcggccacgggcagcagcgcgcgggcaccgcccacagccagggtcgtctcggccaggagcacgagcagcgtgccggcgatggccgcctgctcggccggcgcgagggccacgggaaggtcgatggaggacacctgggcgggcgtcttgtcctcctggttgagcagcgaggccacgaactcggcgttctcgagcgactggagacgcagcaggcgctgcagcagcagcacaagcacggcgcggcgcacgggcagcgaggcagcagacgaggaggaggacagctgcagcgtgaaggacgccgcggaggtggcggcggcttcggccgacgcatccagagcgacagaagccttcagggcagccacggagcacacgtccgccaccgagaggcggtcggcgccgatcgtcacgcgcgcagacgccatgggaaccactgggtcgggaagagcctttgacgcagcggaatttctagtggctcgaatgcctgacatcgtttctatttgtttagaaatgggtggattcggttctgaatacagtcacacctctataaatgacacccagttcgctcggtctaagacgctgtttcagttaaagaattgagcagataaagaaatggctacccttctaatggctacattttcatatggtaggtgcacaagggctttctttacctggtacccctccaggattttcatactcttgttttgtttcgtcttcacgcaatcagaactcaactaataacggtaggcgcggtattgtctgttcctactccttcttctcattggtattagcagaatcgcatcccctcaggttgcacgtgagtttcaatacagtgaggttataggaatatttgttgtcccgatatcctgccaccatgcctgcagttttatcttttgcttggtatctactgcatagccctagttgtctcgacatcataatattttagtttttcgtaaaatatatatgtacgctgcgctgattgtaaagtactgtagctaacttatttatcacaagcttgcagttactgcaaactctttgttccaacttagcatcccaaatacaatttctctcttcgcttgatttgttgcggcgggaaccatggatgttcatcgaggaacatcctaaaaagtacgagaatcgaggaatgcctctcaaaatgggttttcagcgaggaatcgtcgctgacgccccgcatggccccacttaccatgaactgctgcaaagcgttgtaaccaaagccatagtgcacgtaaagaatgtatactgagaaaacgtatagataaatggaattcgtcgtgcaaagtgaacgaaacaaaaatagaaatatttctatgctatttcgatacagtttctatcggcaagagccagactcttgcactcttgcgcgcttacttaaactcggtaagtaacgatggaagctctcgatgctcgcgttgagcaagtgctgggaagtatcacctctgacaataccaagtacgtctatctacgaactttatctcgcttcatagagtggctctacgagaatacggaggcggatcgacggcaagtcctgtttactagtacgtttcgtgagctgggtgcaattaatgggtagagtatcgcgcagtggttctctatcgtccctttacgaagccctgccaatctaagtgtattaagtactatggagtgtatgcgctacttgacctcgatggagcagcgtggtgtcaccggaaagtcgacttttggaaatgttcgctcggcgatagtgtaccttcacactcagacagaaagtcctcggtgaatgctactgcaacgatgcacaccgagcttaacacatggggtgggggctttcatcgagtgccaagagagtttgtgctacccccaagaaccgttcgcgttgtgtggcagcaatggtgtgctgggcaaccgccactaaagcagctatcaaagcacgatatggcttcaagactacaaaagatccggcttgcagagcttcagcggctgatgcgcttcgttgaagcacttctgacgagtgatgaggtcctgcgagcgcacagctctctcgattcggctggccttctttttgagcaagtaaagaatcgtttcccgttctcatcgacgtcgagtaaaggaagagcgcgtagacttgaccaactatcgtggagaacactcgcccgtgagcaggcaaggcacagctccagctagactagctaccattacgtaggtaagtagcggtaagcttacacaatacacatttacttcgaagtagtagtgtttctactttcacactgtgtaccaaatgtgcggcacaatatgcttcgtgcaaactgcacgatgaattccactacatcttgcattatggacattttcatttgatttttgtatagctggcatttttgcattcgtggaattcgccggtcaatttgcaccccgaattctatacgaagtggcagattcgcacggttggaagctctcgatgctcgcgttgagcaagtgctgggaagtatcacctctgacaataccaagtacgtctatctacgaactttatctcgcttcatagagtggctctacgagaatacggaggcggatcgacggcaagtcctgtttactagtacgtttcgtgagctgggtgcaattaatgggtagagtatcgcgcagtggttctctatcgtccctttacgaagccctgccaatctaagtgtattaagtactatggagtgtatgcgctacttgacctcgatggagcagcgtggtgtcaccggaaagtcgacttttggaaatgttcgctcggcgatagtgtaccttcacactcagacagaaagtcctcggtgaatgctactacaccgagcttaacacatggggtgggggctttcatcgagtgccaagagagtttgtgctacccccaagaaccgttcgcgttgtgtggcagcaatggtgtgctgggcaaccgccactaaagcagctatcaaagcacgatatggcttcaagactacaaaagatccggcttgcagagcttcaacggctgatgcgcttcgttgaagcacttctgacgagtgatgaggtcctgcgagcgcacagctctctcgattcggctggccttctttttgagcaagtaaagaatcgtttaccgttctcatcgacgtcgagtaaaggaagagcgcgtagacttgaccaactatcgtggagaacactcgcccgtgagcaggcaaggcacagctccagctagactagctaccattacgtaggtaagtagcggtaagcttacacaatacacatttacttcgaagtagtagtgattctactttcacactgtgtaccaaatgtgcggcacaatatgcttcgtgcaaactgcacgatgaattccactacatcttgcattatggacattttcatttgatttttgtatagctggcatttttgcattcgtggaattcgccggtcaatttgcaccccgaattctatacgaagtggcagattcgcacggttggaagctctcgatgctcgcgttgagcaagtgctgggaagtatcacctctgacaataccaagtacgtctatctacgaactttatctcgcttcatagagtggctctacgagaatacggaggcggatcgacggcaagtcctgtttactagtacgtttcgtgagctgggtgcaattaatgggtagagtatcgcgcagtggttctctatcgtccctttacgaagccctgccaatctaagtgtattaagtactatggagtgtatgcgctacttgacctcgatggagcagcgtggtgtcaccggaaagtcgacttttggaaatgttcgctcggcgatagtgtaccttcacactcagacagaaagtcctcggtgaatgctactgcaacgatgcacaccgagcttaacacatggggtgggggctttcatcgagtgccaagagagtttgtgctacccccaagaaccgttcgcgttgtgtggcagcaatggtgtgctgggcaaccgccactaaagcagctatcaaagcacgatatggcttcaagactacaaaagatccggcttgcagagcttcagcggctgatgcgcttcgttgaagcacttctgacgagtgatgaggtcctgcgagcgcacagctctctcgattcggctggccttctttttgagcaagtaaagaatcgtttcccgttctcatcgacgtcgagtaaaggaagagcgcgtagacttgaccaactatcgtggagaacactcgcccgtgagcaggcaaggcacagctccagctagactagctaccattacgtaggtaagtagcggtaagcttacacaatacacatttacttcgaagtagtagtgtttctactttcacactgtgtaccaaatgtgcggcacaatatgcttcgtgcaaactgcacgatgaattccactacatcttgcattatggacattttcatttgatttttgtatagctggcatttttgcattcgtggaattcgccggtcaatttgcaccccgaattctatacgaagtggcagattcgcacggcgatttccgtagaagtatagataaatggaattcgtcgtgcaaagtgaacgaaacaaaaaatagaaatatttctatgctatttcgatacagtttctatcggcaagagccagactcttgcactcttgcgcgcttacttaaactcggtaagtaacgatggaagctctcgatgctcgcgttgagcaagtgctgggaagtatcacctctgacaataccaagtacgtctatctacgaactttatctcgcttcatagagtggctctacgagaatacggaggcggatcgacggcaagtcctgtttactagtacgtttcgtgagctgggtgcaattaatgggtagagtatcgcgcagtggttctctatcgtccctttacgaagccctgccaatctaagtgtattaagtactatggagtgtatgcgctacttgacctcgatggagcagcgtggtgtcaccggaaagtcgactttggaaatgttcgctcggtgatagtgtaccttcacactcagacagaaagtcctcggtgaatgctactgcaacgatgcacaccgagcttaacacatggggtgggggctttcatcgagtgccaagagagtttgtgctacccccaagaaccgttcgcgttgtgtggcagcaatggtgtgctgggcaaccgccactaaagcagctatcaaagcacgatatggcttcaagactacaaaagatccggcgtgcagagcttcagcggctgatgcgcttcgttgaagcacttctgacgagtgatgaggtcctgcgagcgcacagctctctcgattcggctggccttctttttgagcaagtaaagaatcgtttcccgttctcatcgacgtcgagtaaaggaagagcgcgtagacttgaccaactatcgtggagaacactcgcccgtgagcaggcaaggcacagctccagctagactagctaccattacgtaggtaagtagcggtaagcttacacaatacacatttacttcgaagtagtagtgtttctactttcacactgtgtaccaaatgtgcggcacaatatgcttcgtgcaaactgcacgatgaattccactacatcttgcattatggacattttcatttgatttttgtatagctggcatttttgcattcgtggaattcgccggtcaatttgcaccccgaattctatacgaagtggcagattcgcacggcgatttccgtagaagtatagataaatggaattcgtcgtgcaaagtgaacgaaacaaaaaatagaaatatttctatgctatttcgatacagtttctatcggcaagagccagactcttgcactcttgcgcgcttacttaaactcggtaagtaacgatggaagctctcgatgctcgcgttgagcaagtgctgggaagtatcacctctgacaataccaagtacgtctatctacgaactttatctcgcttcatagagtggctctacgagaatacggaggcggatcgacggcaagtcctgtttactagtacgtttcgtgagctgggtgcaattaatgggtagagtatcgcgcagtggttctctatcgtccctttacgaagccctgccaatctaagtgtattaagtactatggagtgtatgcgctacttgacctcgatggagcagcgtggtgtcaccggaaagtcgactttggaaatgttcgctcggtgatagtgtaccttcacactcagacagaaagtcctcggtgaatgctactgcaacgatgcacaccgagcttaacagggctttcatcgagtgccaagagagtttgtgctacccccaagaaccgttcgcgttgtgtggcagcaatggtgtgctgggcaaccgccactaaagcagctatcaaagcacgatatggcttcaagactacaaaagatccggcttgcagagcttcagcggctgatgcgcttcgttgaagcacttctgacgagtgatgaggtcctgcgagcgcacagctctctcgattcggctggccttctttttgagcaagtaaagaatcgtttaccgttctcatcgacgtcgagtaaaggaagagcgcgtagacttgaccaactatcgtggagaacactcgcccgtgagcaggcaaggcacagctccagctagactagctaccattacgtaggtaagtagcggtaagcttacacaatacacatttacttcgaagtagtagtgtttctactttcacactgtgtaccaaatgtgcggcacaatatgcttcgtgcaaactgcacgatgaattccactacatcttgcattatggacattttcatttgatttttgtatagctggcatttttgcattcgtggaattcgccggtcaatttgcaccccgaattctatacgaagtggcagattcgcacggcgatttctgtagaagttatcttcttaatcggtagcctcggtcatgttttggccagctgagtgctcagactcgaaaaaaatcggtccagtcatgtctgctccgtgggtataagcatcatgcactagctcagccagcgtgttgcaatcgacctgaagtcgacgcaggtcggaaaatttgagcagccagtagtagcggccacgagattctccccaagaggttgttgtcaagactgatgtgacgacgcctcgccaagcgaccgtgtgacgcgaacgcgtcatcagtgaggttggcgtgaccttcactgtgttgtaccgcaatcattcaggtgattacgggacgatgattacgccatgattgtgggtacaggattgtgggtacaagatgggcatcgacgtggcgttctctgattggataaggtaactgtgtatccagtagagaatccagtagggtgtatccagtaagaggtatccagtagcaggcttagaggtagcacgcggttgcgaactaaggacctgaatcgaatcactttgcattttgccaactactgctcaagtgctcttccttttggttatgagcccaagccccgtcttccctgaccaagaccccgactacgccttcgccatggacgccgccccgaccgcgaccgcccgcatcaacaagttcgacggaaccaacttccacacatggaagttcaagatgcagatggtgctggaggagcgcgaactgtgggaagtgacgagtggggaagtgaagctcgagcagtgcacgaccgcggcggaccaagcgacgtttcgcaagaagtcgcgcaaggcgctggcgatcgtctgtctcgcgttggaggactcgcagctgccgctggtgcggtcggcgaaggacgcgcatgatgcacggtcaagactcgagggacgcttcgagaagaagagcctggcgaacaagctctttcttcgtcgacggttcttcacgacaacgatggacgaaggtgatgatgtgctggagcacattaacaagctcaagacgctggcggaacagctcgacgcggttggcgctccggtcagcgaggacgacttggtaatcacgcttcttgccagtctgagcgagtcgtaccagttcctcatcacggcgttggaatcgcgctccgacacgctgacgtgggagctcgtgacgtctcggctcctgcacgaggacatgtagcgcaaggaacaaggtggcggtgctgacggaaccgcgcacgctcaaggtcaagcgttcatgacaagcgacaacgggaagcgcaagggacggcaggcgcaagcgcagaggacgagcgcctgtcactactgcggcgagcacggacattggatcgccaagtgtccggtgcggatccgcgagaacggggagcggcagaggccgcaacgagcgaacgtcgcgcaggtcgaagatgactctggcgacttcctcttctcggttggtggcgacacgggtgcctccaagctgagcggcatgtggctggtcgactcaggtgcgacgcagcacatgacgtactcgaaggagtacatgaagaactacaagaagatctctccggtggacgtgcatctggcggacgacggcgtggttcaggcggtggggagcggcgacatcgtgatgtcgatgcagacaccgcgcggcatgaagaagggtgtgctcacgggtgtgtggcacatcccgaagctgtcgcgcaacctgttctccgtcggccgcttcaccaaagacgtcgggccagtgaccttcgagagcgacgggtgcttcgcggaaacgaagggtctcaagtggaagctcggcgctcgcgaaggcaaagggctgttcaagctctgcatgacgccgaggacgcctgctgacgaggctaatgcggcaagctcgaagaatcgccaaggggacaccacgtcgtacctctggcaccttcgacttggtcacatcggccatggtggtctcgacgccatcgtcaagaagggctacggcactggcatcccaatgacgtcggtgaagcagtgggaggtgtgcgacgggtgcgcactcggcaagcaaacgcgagtaagcttcatgaagtcgtcgccgaaccgtgcgaagcaagtgctggaggtggtccacagcgatgtgtgcggtccgatgcagacggcgacgttcggaggcaagcgctacttcgtcacgttcatcgacgacaagtcgcacttctgcgtggtgtacctgctacggaacaaatcggaggtggctgccaagttcgctgcgttcgtcgcgttggctgaaacgcagaccggcaagcgagtgaaggtgcttcggagcgacaacggcggcgagtacacttcgggtgcgatggccaagttgtgtgcggatcgcggcatcgagcagaagttcacgccaccatacacgcctcagctcaacggagtggccgagcgaatgaatcggacgctggtggagtgtgcgcgctgcatgctggagcacgccgggttgtcgaaggagtactggggagaagcagtgatgacggccacgttcctccgcaaccggtgtccgacgcgcgccatcagtcacgacaagtcgccgcaccacgtttggaccggcaagaagcctttgctggccaacctcaaggtgttcgggtgccacgcgtacgtgcacgtgccgaaggagaagcggtcgaagttcgacgctcggtcggtgcgctgtcgtttcctcgggtactcggagcacgagaaggcgtatcggttcgaggagatcgagagcggtcgcgtgttggtgagccgcgacgcgcagttcatggaggatgtcttcgacggtgggagacgcaactacgcttcgaaggaggtgttggtgggtcttccgacagatgatgatgaagacaccacggatgaagagactcagtccggatcagacgagaacagagaagaagctgcgcggaatcaagactttgaacccggcagcaagcgacacccgcgcacgcagtcgctcgaggaagccgtggaggttccgagtgccaagcggtatgcggtgccgagacgacagcagccgctggacgagatgtctgccgcagcacaagagaaggaagacttcgaggctgcgtacgtcgtggattcagtgggagagatgccgacaacgttcaagtcggcgatggaatccagcgacgcagacaagtggaaagaggcgtgcgactcggaggtggagtcgctccgcaagaacgagacgtggaccctggtgccactgccgaagggacgcaaggcgatcggctgcagatgggtgttccgcgtgaaggagaaccagtctggagagatcgagcggttcaaggcgcgactggtggcgaaggggttctcgcagaagtacggcatcaactacgacgagacgttcgcgccggtggccaagttcacgtcgattcgggtgttgttgagtctggcggccaagtacaagctcacagtgcaccagatggatgtgaagaccgcgttcctcaacggcttgttggacgaggacatctacatggcgcagccggacggatatgtggacggagatcgacccgactacgtgtgccggctcaagcgttcgctgtacggcctgaagcagtcgccgcggatgtggaacaagacgatcgacgagttcatgttgaaactggggttcaagaagtgcgagtccgaccactgcatctacttgaagcgggacaatcacgacatgatgttcgtggcacggtacgtggacgatctggtcctcgccagcagcagcgacgggatgctgaaggacacgaagcaggcgctgagtgaccggttcgagatgaccgacatgggccagctcaagtactttctcggtatggagatcgagcaagatgtggcgactgggaaggtgtcggtgcggcagaccaagttcgcgaaggacattctcgagaagttcaagatggatgagagcaaccctgtgaagacaccgcaggatccgggtctgaagctgaccaaggccatgtgcgagggaggctgcaagcacgacgagaccatggcgaatgttccgtaccggaacgccgtgggctgcctcatgtatctcatggtggggactcgtccggacctcgcagcggcagtgggagtgctgagccagttcgcagcggacccatgtccgacacactggcaggcgctcaagagggtcttccgctacatccgaggcacgaagacgcacggcctcgtgtttcaagcgagcagcgaggacggactgcaaggctactcggacgcggactgggccggcgacatcgagtctcgacggagtacgagcggctacgcgttcatgatgaacggcggatgcatcagctggcgaagcaagaagcagcgcacggtggcgctctcgtcgacggaagccgagtacatggcgctgtcggaggccacgcaggaggcggtgtggctcaaggtgtttctgtgcgagctgggcgagatggcgagcgatgaagcggtgaagatctacgaggacaaccaaggctccatcgcgttggccaagaacccggagttccacaagcgcaccaagcacatcgacattcgctaccacttcgtgcgcgagaaggtggaagacggtcaagtggtgttgcagtatgtttcgacactcgacatgctggcggacatcatgacgaagccgatcgcggcgccgcagttcgacgcgctcagaacgaagctgggcatcgtggtcgctgacgagtcgagtgggagtgttgtcaagactgatgtgacgacgcctcgccaagcgaccgtgtgacgcgaacgcgtcatcagtgaggttggcgtgaccttcactgtgttgtaccgcaatcattcaggtgattacgggacgatgattacgtcacggtgattacgccatgattgtgggtacaggattgtgggtacaagatgggcatcgacgtggcgttctctgattggataaggtaactgtgtatccagtagagaatccagtagggtgtatccagtaagaggtatccagtagcaggcttagaggtagcacgcggttgcgaactaaggacctgaatcgaatcactttgcattttgccaactactgctcaagtgctcttccttttggttgtcctcgtagatcttcaccccttcatcgctcgccatctcgcccagctcgcacagaaacaccttgagccacaccgcctcctgcgtggcctccgacagcgccatgtactcggcttccgtcgacgagagcgccaccgtgcgctgcttcttgcttcgccagctgatgcatccgccgttcatcatgaacgcgtagccgctcgtactccgtcgagactcgatgtcgccggcccagtccgcgtccgagtagccttgcagtccgtcctcgctgctcgcttgaaacacgaggccgtgcgtcttcgtgcctcgtgttgtcaagactgatgtgacgacgcctcgccaagcgaccgtgtgacgcgaacgcgtcatcagtgaggtcggcgtgaccttcactgtgtggtaccgaaatcattcaggtgattacgggacgatgattacgtcacggtgattacgccaagattgtgggtacaagatgggcatcgacgtggcgttctctgattggataaggtaactgtgtatccagtagagaatccagtagggtgtatccagtaagaggtatccagtagcaggcttagaggtagcacgcggttgcgaactaaggacctgaatcgaatcactttgcattttgccaactactgcccaagtgctcttccttttggttatgagcccaagccccgtcttccctgaccaagaccccgactacgccttcgccatggacgctgccccgaccgcgaccgcccgcatcaacaagttcgacggaaccaacttccacacatggaagttcaagatgcagatggtgctggaggagcgcgaactgtgggaagtgacgagtggggaagtgaagctcgagcagtgcacgaccgcggcggaccaagcgacgtttcgcaagaagtcgcgcaaggcgctggcgatcgtctgtctcgcgttggaggactcgcagctgccgctggtgcggtcggcgaaggacgcgcatgatgcatggtcaagactcgagggacacttcgagaagaagagcctggcgaacaagctctttcttcgtcgacggttcttcacgacaacgatggacgaaggtgatgatgtgctggagcacattaacaagctcaagacgctggcggaacagctcgacgcggtcggcgctccggtcagcgaggacgacttggtgatcacgcttcttgccagtctgagcgagtcgtaccagttcctcatcacggcgttggaatcgcgttccgacacgctgacgtgggagctcgtgacgtctcggctcctgcacgaggacatgaagcgcaaggaacaaggtggcggtgctgacggaaccgcgcacgctcaaggtcaagcgttcatgacaagcgacaacgggaagcgcaagggacggcaggcgcaagcgcagaggacgagcgcctgtcactactgcggcgagcacggacattggatcgccaagtgtccggtgcggatccgcgagaacggggagcggcagaggccgcaacgagcgaacgtcgcgcaggtcgaagatgactctggcgacttcctcttctcggttggtggcgacacgggtgcctccaagctgagcggcatgtggctggtcgactcgggtgcgacgcagcacatgacgtactcgaaggagtacatgaagaactacaagaagatctctccggtggacgtgcatctggcggacgacggcgtggttcaggcggtggggagcggcgacatcgtgatgtcgatgcagacaccgcgcggcatgaagaagggtgtgctcacgggtgtgtggcacatcccgaagctgtcgcgcaacctgttctccgtcggccgcttcaccaaggacgtcgggccagtgaccttcgagagcgacgggtgcttcgcggaaacgaagggtctcaagtggaagctcggcgctcgcgaaggcaaaggactgttcaagctctgcatgacgccgaggacgcctgctgacgaggccaatgcggcaagctcgaagaatcgccaaggggacaccacgtcgtacctctggcaccttcgacttggtcacatcggccatggtggtctcgacgccatcgtcaagaagggctacggcactggcatcccaatgacgtcggtgaagcagtgggaggtgtgcgacgggtgcgcactcggcaagcaaacgcgagtaagcttcatgaagtcgtcgccgaaccgtgcgaagcaagtgctggaagtggtccacagcgatgtgtgcggtccgatgcagacggcgacgttcggaggcaagcgctacttcgtcacgttcatcgacgacaagtcgcacttctgcgtggtgtacctgctacggaacaagtcggaggtggctgccaagttcgctgcgttcgtcgcgttggctgagacgcagaccggcaagcgagtgaaggtgcttcggagcgacaacggcggcgagtacacttcgggtgcgatggccaagttgtgtgcggatcgcggcatcgagcagaagttcacgccaccatacacgcctcagctcaacggagtggccgagcgaatgaatcggacgctggtggagtgtgcgcgctgcatgctggagcacgccgggttgtcgaaggagtactggggagaagcggtgatgacggccacgttcctccgcaaccggtgtccgacgcgcgccatcagtcacgacaagtcgccgcaccacgtttggaccggcaagaagcctttgctggccaacctcaaggtgttcgggtgccacgcgtacgtgcacgtgccgaaggagaagcggtcgaagttcgacgctcggtcggtgcgctgtcgtttcctcgggtactcggagcacgagaaggcgtatcggttcgaggagatcgagagcggtcgcgtgttggtgagccgcgacgcgcagttcatggaggatgtcttcgacggtgggagacgcgactacgcttcgaaggaggtgttggtgggtcttccgacagatgatgatgaagacaccacggatgaagagactcagtccggatcagacgagaacagagaagaagctgcgcggaatcaagactttgaacccggcagcaagcgacacccgcgcacgcagtcgctcgaggaagccgtggaggttccgagtgccaagcggtatgcggtgccaagacgacagcaaccgctggacgagatgtctgccgcagcacaagagaaggaagacttcgaggctgcgtacgtcgtggattcagtgggagagatgccgacaacgttcaagtcggcgatggaatccagcgacgcagacaagtggaaagaggcgtgcgactcggaggtggagtcgctccgcaagaacgagacgtggaccctggtgccactgccgaagggacgcaaggcgatcggctgcagatgggtgttccgcgtgaaggagaaccagtctggagagatcgagcggttcaaggcgcgactggtggcgaaggggttctcgcagaagtacggcatcgactacgacgagacgttcgcgccggtggccaagttcacgtcgattcgggtgttgctgagtctggcggccaagtacaagctcacagtgcaccagatggatgtgaagaccgcgttcctcaacggcttgttggacgaggacatctacatggcgcagccggacggatatgtggacggagatcgacccgactacgtgtgccggctcaagcgttcgctgtacggcctgaagcagtcgccgcggatgtggaacaagacgatcgacgagttcatgttgaagctggggttcaagaagtgcgagtccgaccactgcatctacttgaagcgggacaatcacgacatgatgttcgtggcactgtacgtggacgatctggtcctcgccagcagcagcgacaggatgctgaaggacacgaagcaggcgctgagtgaccggttcgagatgactgacatgggccagctcaagtactttctcggtatggagatcgagcaagatgtggcgactgggaaggtgtcggtgcggcagaccaagttcgcgaaggacattctcgagaagttcaagatggatgagagcaaccctgtgaagacaccgcaggatccgggtctgaagctgaccaaggccatgtgcgagggaggctgcaagcacgacgagaccatggcgaatgttccgtaccggaacgccgtgggctgcctcatgtatctcatggtggggactcgtccggacctcgcagcggcagtgggagtgctgagccagttcgcagcggacccatgtccgacacactggcaggcgctcaagagggtcttccgctacatccgaggcacgaagacgcacggcctcgtgtttcaagcgagcagcgaggacggactgcaaggctactcggacgcggactgggccggcgacatcgagtctcgacggagtacgagcggctacgcgttcatgatgaacggcggatgcatcagctggcgaagcaagaagcagcgcacggtggcgctctcgtcgacggaagccgagtacatggcgctgtcggaggccacgcaggaggcggtgtggctcaaggtgtttctgtgcgagctgggcgagatggcgagcgatgaagcggtgaagatctacgaggacaaccaaggctccatcgcgttggccaagaacccagagttccacaagcgcaccaagcacatcgacattcgctaccacttcgtgcgcgagaaggtggaagacggtcaagtggtgttgcagtatgtttcgacactcgacatgctggcggacatcatgacgaagccgatcgcggcgccgcagttcgacgcgctcaggacgaagctgggcatcgtggtcgctgacgagtcgagtgggagtgttgtcaagactgatgtgacgacgccccgccaagcgaccgtgtgacgcgaacgcgtcatcagtgaggtcggcgtgaccttcactgtgtggtaccgaaatcattcaggtgattacgggacgatgattacgtcacggtgattacgccaagattgtgggtacaagatgggcatcgacgtggcgttctctgattggataaggtaactgtgtatccagtagagaatccagtagggtgtatccagtaagaggtacccagtagcaggcttagaggtagcacgcggttgcgaactaaggacctgaatcgaatcactttgcattttgccaactactgctcaagtgttcttccttttggttatgagcccaagccccgtcttccctgaccaagaccccgactacgccttcgccatggacgccgccccgaccgcgaccgcccgcatcaacaagttcgacggaaccaacttccacacatggaagttcaagatgcagatggtgctggaggagcgcgaactgtgggaagtgacgagtggggaagtgaagctcgagcagtgcacgaccgcggcggaccaagcgacgtttcgcaagaagtcgcgcaaggcgctggcgatcgtctgtctcgcgttggaggactcgcagctgccgctggtgcggtcggcgaaggacgcgcatgatgcatggtcaagactcgagggacacttcgagaagaagagcctggcgaacaagctctttcttcgtcgacggttcttcacgacaacgatggacgaaggtgatgatgtgctggagcacattaacaagctcaagacgctggcggaacagctcgacgcggtcggcgctccgatcagcgaggacgacttggtgatcacgcttcttgccagtctgagcgagtcgtaccagttcctcatcacggcgttggaatcgcgttccgacacgctgacgtgggagctcgtgacgtctcggctcctgcacgaggacatgaagcgcaaggaacaaggtggcggtgctgacggaaccgcgcacgctcaaggtcaagcgttcatgacaagcgacaacgggaagcgcaagggacggcaggcgcaagcgcagaggacgagcgcctgtcactactgcggcgagcacggacattggatcgccaagtgtccggtgcggatccgcgagaacggggagcggcagaggccgcaacgagcgaacgtcgcgcaggtcgaagatgactctggcgacttcctcttctcggttggtggcgacacgggtgcctccaagctgagcggcatgtggctggtcgactcgggtgcgacgcagcacatgacgtactcgaaggagtacatgaagaactacaagaagatctctccggtggacgtgcatctggcggacgacggcgtggttcaggcggtggggagcggcgacatcgtgatgtcgatgcagacaccgcgcggcatgaagaagggtgtgctcacgggtgtgtggcacatcccgaagctgtcgcgcaacctgttctccgtcggccgcttcaccaaggacgtcgggccagtgaccttcgagagcgacgggtgcttcgcggaaacgaagggtctcaagtggaagctcggcgctcgcgaaggcaaaggactgttcaagctctgcatgacgccgaggacgcctgctgacgaggccaatgcggcaagctcgaagaatcgccaaggggacaccacgtcgtacctctggcaccttcgacttggtcacatcggccatggtggtctcgacgccatcgtcaagaagggctacggcactggcatcccaatgatgtcggtgaagcagtgggaggtgtgcgacgggtgcgcactcggcaagcaaacgcgagtaagcttcatgaagtcgtcgccgaaccgtgcgaagcaagtgctggaggtggtccacagcgatgtgtgcggtccgatgcagacggcgacgttcggaggcaagcgctacttcgtcacgttcatcgacgacaagtcgcacttctgcgtggtgtacctgctacggaacaagtcggaggtggctgccaagttcgctgcgttcgtcgcgttggctgagacgcagaccggcaagcgagtgaaggtgcttcggagcgacaacggcggcgagtacacttcgggtgcgatggccaagttgtgtgcggatcgcggcatcgagcagaagttcacgccaccatacacgcctcagctcaacggagtggccgagcgaatgaatcggacgctggtggagtgtgcgcgctgcatgctggagcacgccgggttgtcgaaggagtactggggagaagcggtgatgacggccacgttcctccgcaaccggtgtccgacgcgcgccatcagtcacgacaagtcgccgcaccacgtttggaccggcaagaagcctttgctggccaacctcaaggtgttcgggtgccacgcgtacgtgcacgtgccgaaggagaagcggtcgaagttcgacgctcggtcggtgcgctgtcgtttcctcgggtactcggagcacgagaaggcgtatcggtttgaggagatcgagagcggtcgcgtgttggtgagccgcgacgcgcagttcatggaggatgtcttcgacggtgggagacgcgactacgcttcgaaggaggtgttggtgggtcttccgacagatgatgatgaagacaccacggatgaagagactcagtccggatcagacgagaacagagaagaagctgcgcggaatcaagactttgtacccggcagcaagcgacacccgcgcacgcagtcgctcgaggaagccgtggaggttccgagtgccaagcggtatgcggtgccgagacgacagcagccgctggacgagatgtctgccgcagcacaagagaaggaagacttcgaggctgcgtacgtcgtggattcagtgggagagatgccgacaacgttcaagtcggcgatggaatccagcgacgcagacaagtggaaagaggcgtgcgactcggaggtggagtcgctccgcaagaacgagacgtggaccctggtgccactgccgaagggacgcaaggcgatcggctgcagatgggtgttccgcgtgaaggagaaccagtctggagagatcgagcggttcaaggcgcgactggtggcgaaggggttctcgcagaagtacggcatcgactacgacgagacgttcgcgccggtggccaagttcacgtcgattcgggtgttgctgagtctggcggccaagtacaagctcacagtgcaccagatggatgtgaagaccgcgttcctcaacggcttgttggacgaggacatctacatggcgcagccggacggatatgtggacggagatcgacccgactacgtgtgccggctcaagcgttcgctgtacggtctgaagcagtcgccgcggatgtggaacaagacgatcgacgagttcatgttgaagctggggttcaagaagtgcgagtccgaccactgcatctacttgaagcgggacaatcacgacatgatattcgtggcactgtacgtggacgatctggtcctcgccagcagcagcgacgggatgctgaaggacacgaagcaggcgctgagtgaccggttcgagatgaccgacatgggccagctcaagtactttctcggtatggagatcgagcaagatgtggcgactgggaaggtgtcggtgcggcagaccaagttcgcgaaggacattctcgagaagttcaagatggatgagagcaaccctgtgaagacaccgcaggatccgggtctgaagctgaccaaggccatgtgcgagggaggctgcaagcacgacgagaccatggcgaatgttccgtaccggaacgccgtgggctgcctcatgtatctcatggtggggactcgtccggacctcgcagcggcagtgggagtgctgagccagttcgcagcggatccatgtccgacacactggcaggcgctcaagagggtcttccgctacatccgaggcacgaagacgcacggcctcgtgtttcaagcgagcagcgaggacggactgcaaggctactcggacgcggactgggccggcgacatcgagtctcgacggagtacgagcggctacgcgttcatgatgaacggcggatgcatcagctggcgaagcaagaagcagcgcacggtggcgctctcgtcgacggaagccgagtacatggcgctgtcggaggccacgcaggaggcggtgtggctcaaggtgtttctgtgcgagctgggcgagatggcgagcgatgaagcggtgaagatctacgaggacaaccaaggctccatcgcgttggccaagaacccggagttccacaagcgcaccaagcacatcgacattcgctaccacttcgtgcgcgagaaggtggaagacggtcaagtggtgttgcagtatgtttcgacactcgacatgctggcggacatcatgacgaagccgatcgcggcgccgcagttcgacgcgctcaggacgaagctgggcatcgtggtcgctgacgagtcgagtgggagtgttgtcaagactgatgtgacgacgcctcgccaagcgaccgtgtgacgcgaacgcgtcatcagtgaggtcggcgtgaccttcactgtgttgtaccgcaatcattcaggtgattacgggacgatgattacgtcacggtgattacgccatgattgtgggtacaggattgtgggtacaagatgggcatcgacgtggcgttctctgattggataaggtaactgtgtatccagtagagaatccagtagggtgtatccagtaagaggtatccagtagcaggcttagaggtagcacgcggttgcgaactaaggacctgaatcgaatcactttgcattttgccaactactgctcaagtgttcttccttttccgagtacccgaggaaacgacagcgcaccgaccgagcgtcgaacttcgaccgcttctccttcggcacgtgcacgtacgcgtggcacccgaacaccttgaggttggccagcaaaggcttcttgccggtccaaacgtggtgcggcgacttgtcgtgactgatggcgcgcgtcggacaccggttgcggaggaacgtggccgtcatcaccgcttctccccagtactccttcgacaacccggcgtgctccagcatgcagcgcgcacactccaccagcgtccgattcattcgctcggccactccgttgagctgaggcgtgtatggtggcgtgaacttctgctcgatgccgcgatccgcacacaacttggccatcgcacccgaagtgtactcgccgccgttgtcgctccgaagcaccttcactcgcttgccggtctgcgtctcagccaacgcgacgaacgcagcgaacttggcagccacctccgacttggtccgtagcaggtacaccacgcagaagtgcgacttgtcgtcgatgaacgtgacgaagtagcgcttgcctccgaacgtcgccgtctgcatcggaccgcacacatcgctgtggaccacctccagcacttgcttcgcacggttcggcgacgacttcatgaagcttactcgcgtttgcttgccgagtgcgcacccgtcgcacacctcccactgcttcaccgacgtcattgggatgccagtgccgtagcccttcttgacgatggcgtcgagaccaccatggccgatgtgaccaagtcgaaggtgccagaggtacgacgtggtgtccccttggcgattcttcgagcttgccgcattggcctcgtcagcaggcgtcctcggcgtcatgcagagcttgaacagtcctttgccttcgcgagcgccgagcttccacttgagacccttcgtttccgcgaagcacccgtcgctctcgaaggtcactggcccgacgtccttggtgaagcggccgacggagaacaggttgcgcgacagcttcgggatgtgccacacacccgtgagcacacccttcttcatgccgcgcggtgtctgcatcgacatcacgatgtcgccgctccccaccgcctgaaccacgccgtcgtccgccagatgcacgtccaccggagagatcttcttgtagttcttcatgtactccatcgagtacgtcatgtgctgcgtcgcacccgagtcgaccagccacatgccgctcagcttggaggcacccgtgtcgccaccaaccgagaagaggaagtcgccagagtcatcttcgacctgcgcgacgttcgctcgttgcggcctctgccgctccccgttctcgcggatccgcaccggacccttggcgatccaatgtccgtgctcgccgcagtagtgacaggcgctcgtcctctgcgcttgcgcctgccgtcccttgcgcttcccgttgtcgcttgtcatgaacgcttgaccttgagcgtgcgcggttccgtcagcaccgccaccttgttccttgcgcttcatgtcctcgtgcaggagccgagacgtcacgagctcccacgtcagcgtgtcggaacgcgattccaacgccgtgatgaggaactggtacgactcgctcagactggcaagaagcgtgatcaccaagtcgtcctcgctgaccggagcgccgaccgcgtcgagctgttccgccagcgtcttgagcttgttaatgtgctccagcacatcatcaccttcgtccatcgttgtcgtgaagaaccgtcgacgaagaaagagcttgttcgccaggctcttcttctcgaagtgtccctcgagtcttgaccatgcatcatgcgcgtccttcgccgaccgcaccagcggcagctgcgagtcctccatcgcgaggcagacgatcgccagcgccttgcgcgacttcttgcgaaacgtcgcttggtccgccgcggtcgtgcactgctcgagcttcacttccccactcgtcacttcccacagttcgcgctcctccagcaccatctgcatcttgaacttccatgtgtggaagttggttccgtcgaacttgttgatgcgggcggtcgcggttggggcggcgtccatggcgaaggcgtagtcggggtcttggtcagggaagacggggcttgggctcataaccaaaaaggaagagcacttgagcagtagttggcaaaatgcaaagtgattcgattcaggtccttagttcgcaaccgcgtgctacctctaagcctgctactggatacctcttactggatacaccctactggattctctactggatacacagttaccttatccaatcagagaacgccacgtcgatgcccatcttgtacccacaatcttggcgtaatcaccgtgacgtaatcatcgtcccgtaatcacctgaatgatttcggtaccacacagtgaaggtcacgccgacctcactgatgacgcgttcgcgtcacacggtcgcttggcggggcgtcgtcacatcagtcttgacaacactcccactcgactcgtcagcgaccacgatgcccagcttcgtcctgagcgcgtcgaactgcggcgccgcgatcggcttcgtcatgatgtccgccagcatgtcgagtgtcgaaacatactgcaacaccacttgaccgtcttccaccttctcgcgcacgaagtggtagcgaatgtcgatgtgcttggtgcgcttgtggaactccgggttcttggccaacgcgatggagccttggttgtcctcgtagatcttcaccccttcatcgctcgccatctcgcccagctcgcacagaaacaccttgagccacaccgcctcctgcgtggcctccgacagcgccatgtactcggcttccgtcgacgagagcgccaccgtgcgctgcttcttgcttcgccagctgatgcatccgccgttcatcatgaacgcgtagccgctcgtactccgtcgagactcgatgtcgccggcccagtccgcgtccgagtagccttgcagtccgtcctcgctgctcgcttgaaacacgaggccgtgcgtcttcgtgcctcggatgtagcggaagaccctcttgagcgcctgccagtgtgtcggacatgggtccgctgcgaactggctcagcactcccactgccgctgcgaggtccggacgagtccccaccatgagatacatgaggcagcccacggcgttccggtacggaacattcgccatggtctcgtcgtgcttgcagcctccctcgcacatggccttggtcagcttcagacccggatcctgcggtgtcttcacagggttgctctcatccatcttgaacttctcgagaatgtccttcgcgaacttggtctgccgcaccgacaccttcccagtcgccacatcttgctcgataccgaggaagtacttgagctggcccatgtcagtcatctcgaaccggtcactcagcgcctgcttcgtgtccttcagcatcccgtcgctgctgctggcgaggaccagatcgtccacgtacagtgccacgaacatcatgtcgtgattgtcccgcttcaagtagatgcagtggtcggactcgcacttcttgaaccccaaaaggaagagcacttgagcagtagttggcaaaatgcaaagtgattcgattcaggtccttagttcgcaaccgcgtgctacctctaagcctgctactggatacctcttactggatacaccctactggattctctactggatacacagttaccttatccaatcagagaacgccacgtcgatgcccatcttgtacccacaatcctgtacccacaatcatggcgtaatcaccgtgacgtaatcatcgtcccgtaatcacctgaatgattgcggtacaacacagtgaaggtcacgccgacctcactgatgacgcgttcgcgtcacacggtcgcttggcgaggcgtcgtcacatcagtcttgacaacactcccactcgactcgtcagcgaccacgatgcccagcttcgtcctgagcgcgtcgaactgcggcgccgcgatcggcttcgtcatgatgtccgccagcatgtcgagtgtcgaaacatactgcaacaccacttgaccgtcttccaccttctcgcgcacgaagtggtagcgaatgtcgatgtgcttggtgcgcttgtggaactccgggttcttggccaacgcgatggagccttggttgtcctcgtagatcttcaccgcttcatcgctcgccatctcgcccagctcgcacagaaacaccttgagccacaccgcctcctgcgtggcctccgacagcgccatgtactcggcttccgtcgacgagagcgccaccgtgcgctgcttcttgcttcgccagctgatgcatccgccgttcatcatgaacgcgtagccgctcgtactccgtcgagactcgatgtcgccggcccagtccgcgtccgagtagccttgcagtccgtcctcgctgctcgcttgaaacacgaggccgtgcgtcttcgtgcctcggatgtagcggaagaccctcttgagcgcctgccagtgtgtcggacatggatccgctgcgaactggctcagcactcccactgccgctgcgaggtccggacgagtccccaccatgagatacatgaggcagcccacggcgttccggtacggaacattcgccatggtctcgtcgtgcttgcagcctccctcgcacatggccttggtcagcttcagacccggatcctgcggtgtcttcacagggttgctctcatccatcttgaacttctcgagaatgtccttcgcgaacttggtctgccgcaccgacaccttcccagtcgccacatcttgctcgatctccataccgagaaagtacttgagctggcccatgtcggtcatctcgaaccggtcactcagcgcctgcttcgtgtccttcagcatcccgtcgctgctgctggcgaggaccagatcgtccacgtacagtgccacgaacatcatgtcgtgattgtcccgcttcaagtaaatgcagtggtcggactcgcacttcttgaaccccagcttcaacatgaactcgtcgatcgtcttgttccacatccgcggcgactgcttcaggccgtacagcgaacgcttgagccggcacacgtagtcgggtcgatctccgtccacatatccgtccggctgcgccatgtagatgtcctcgtccaacaagccgttgaggaacgcggtcttcacatccatctggtgcactgtgagcttgtacttggccgccagactcagcaacacccgaatcgacgtgaacttggccaccggcgcgaacgtctcgtcgtagtcgatgccgtacttctgcgagaaccccttcgccgccagtcgcgccttgaaccgctcgatctctccagactggttctccttcacgcggaacacccatctgcagccgatcgccttgcgtcccttcggcagtggcaccagggtccacgtctcgttcttgcggagcgactccaccttcgagtcgcacgcctctttccacttgtctgcgtcgctggattccatcgccgacttgaacgttgtcggcatctctcccactgaatccacgacgtacgcagcctcgaagtcttccttctcttgtgctgcggcagacatctcgtccagcggctgctgtcgtctcggcaccgcataccgcttggcactcggaacctccacggcttcctcgagcgactgcgtgcgcgggtgtcgcttgctgccgggttcaaagtcttgattccgcgcagcttcttcgctgttctcgtctgatccggactgagtctcttcatccgtggtgtcttcatcatcatctgtcggaagacccaccaacacctccttcgaagcgtagtcgcgtctcccaccgtcgaagacatcctccatgaactgcgcgtcgcggctcaccaacacgcgaccgctctcgatctcctcgaaccgatacgccttctcgtgctccgagtacccgaggaaacgacagcgcaccgaccgagcgtcgaacttcgaccgcttctccttcggcacgtgcacgtacgcgtggcacccgaacaccttgaggttggccagcaaaggcttcttgtcggtccaaacgtggtgcggcgacttgtcgtgactgatggcgcgcgtcggacaccggttgcggaggaacgtggccgtcatcactgcttctccccagtactccttcgacaacccggcgtgctccagcatgcagcgcgcacactccaccagcgtccgattcattcgctcggccactccgttgagctgaggcgtgtatggtggcgtgaacttctgctcgatgccgcgatccgcacacaacttggccatcgcacccgaagtgtactcgccgccgttgtcgctccgaagcaccttcactcgcttgccggtctgcgtttcagccaacgcgacgaacgcagcgaacttggcagccacctccgacttgttccgtagcaggtacaccacgcagaagtgcgacttgtcgtcgatgaacgtgacgaagtagcgcttgcctccgaacgtcgccgtctgcatcggaccgcacacatcgctgtggaccacctccagcacttgcttcgcacggttcggcgacgacttcatgaagcttactcgcgtttgcttgccgagtgcgcacccgtcgcacacctcccactgcttcaccgacgtcattgggatgccagtgccgtagcccttcttgacgatggcgtcgagaccaccatggccgatgtgaccaagtcgaaggtgccagaggtacgacgtggtgtccccttggcgattcttcgagcttgccgcattggcctcgtcagcaggcgtcctcggcgtcatgcagagcttgaacagtcctttgccttcgcgagcgccgagcttccacttgagacccttcgtttccgcgaagcacccgtcgctctcgaaggtcactggcccgacgtccttggtgaagcggccgacggagaacaggttgcgcgacagcttcgggatgtgccacacacccgtgagcacacccttcttcatgccgcgcggtgtctgcatcgacatcacgatgtcgccgctccccaccacctgatccacgccgtcgtccgccagatgcacgtccaccggagagatcttcttgtagttcttcatgtactccttcgagtacgtcatgtgctgcgtcgcacccgagtcgaccagccacatgccgctcagcttggaggcacccgtgtcgccaccaaccgagaagaggaagtcgccagagtcatcttcgacctgcgcgacgttcgctcgttgcggcctctgccgctccccgttctcgcggatccgcaccggacacttggcgatccaatgtccgtgctcgccgcagtagtgacaggcgctcgtcctctgcgcttgcgcctgccgtcccttgcgcttcccgttgtcgcttgtcatgaacgcttgaccttgagcgtgcgcggttccgtcagcaccgccaccttgttccttgcgcttcatgtcctcgtgcaggagccgagacgtcacgagctcccacgtcagcgtgtcggagcgcgattccaacgccgtgatgaggaactggtacgactcgctcagactggcaagaagcgtgatcaccaagtcgtcctcgctgaccggagcgccgaccgcgtcgagctgttccgccagcgtcttgagcttgttaatgtgctccagcacatcatcaccttcgtccatcgttgtcgtgaagaaccgtcgacgaagaaagagcttgttcgccaggctcttcttctcgaagtgtccctcgagtcttgaccatgcatcatgcgcgtccttcgccgaccgcaccagcggcagctgcgagtcctccaacgcgagacagacgatcgccagcgccttgcgcgacttcttgcgaaacgtcgcttggtccgccgcggtcgtgcactgctcgagcttcacttccccactcgtcacttcccacagttcgcgctcctccagcaccatctgcatcttgaacttccatgtgtggaagttggttccgtcgaacttgttgatgcgggcggtcgcggtcggggcggcgtccatggcgaaggcgtagtcggggtcttggtcagggaagacggggcttgggctcataaccaaaaggaagaacacttgagcagtagttgacaaaatgcaaagtgattcgattcaggtccttagttcgcaaccgcgtgctacctctaagcctgctactggatacctcttactggatacaccctactggattctctactggatacacagttaccttatccaatcagagaacgccacgtcgatgcccatcttgtacccacaatcttggcgtaatcaccgtgacgtaatcatcgtcccgtaatcacctgaatgatttcggtaccacacagtgaaggtcacgccgacctcactgatgacgcgttcgcgtcacacggtcgcttggcggggcgtcgtcacatcagtcttgacaacacgaatgaatcggacgctggtggagtgtgcgcgctgcatgctggagcacgccgggttgtcgaaggagtactggggagaagcggtgatgacggccacgttcctccgcaaccggtgtccgacgcgcgccatcagtcacgacaagtcgccgcaccacgtttggaccggcaagaagcctttgctggccaacctcaaggtgttcgggtgccacgcgtacgtgcacgtgccgaaggagaagcggtcgaagttcgacgctcggtcggtgcgctgtcgtttcctcgggtactcggagcacgagaaggcgtatcggttcgaggagatcgagagcggtcgcgtgttggtgagccgcgacgcgcagttcatggaggatgtcttcgacggtgggagacgcgactacgcttcgaaggaggtgttggtgggtcttccgacagatgatgatgaagacaccacggatgaagagactcagtccggatcagacgagaacagagaagaagctgcgcggaatcaagactttgaacccggcagcaagcgacacccgcgcacgcagtcgctcgaggaagccgtggaggttccgagtgccaagcggtatgcggtgccaagacgacagcaaccgctggacgagatgtctgccgcagcacaagagaaggaagacttcgaggctgcgtacgtcgtggattcagtgggagagatgccgacaacgttcaagtcggcgatggaatccagcgacgcagacaagtggaaagaggcgtgcgactcggaggtggagtcgctccgcaagaacgagacgtggaccctggtgccactgccgaagggacgcaaggcgatcggctgcagatgggtggggatcctnnnnnnnnnnnnnnnnnnnnnnnnnnnnnnnnnnnnnnnnnnnnnnnnnnnnnnnnnnnnnnnnnnnnnnnnnnnnnnnnnnnnnnnnnnnnnnnnnnnnnnnnnnnnnnnnnnnnnnnnnnnnnnnnnnnnnnnnnnnnnnnnnnnnnnnnnnnnnnnnnnnnnnnnnnnnnnnnnnnnnnnnnnnnnnnnnnnnnnnnnnnnnnnnnnnnnnnnnnnnnnnnnnnnnnnnnnnnnnnnnnnnnnnnnnnnnnnnnnnnnnnnnnnnnnnnnnnnnnnnnnnnnnnnnnnnnnnnnnnnnnnnnnnnnnnnnnnnnnnnnnnnnnnnnnnnnnnnnnnnnnnnnnnnnnnnnnnnnnnnnnnnnnnnnnnnnnnnnnnnnnnnnnnnnnnnnnnnnnnnnnnnnnnnnnnnnnnnnnnnnnnnnnnnnnnnnnnnnnnnnnnnnnnnnnnnnnnnnnnnnnnnnnnnnnnnnnnnnnnnnnnnnnnnnnnnnnnnnnnnnnnnnnnnnnnnnnnnnnnnnnnnnnnnnnnnnnnnnnnnnnnnnnnnnnnnnnnnnnnnnnnnnnnnnnnnnnnnnnnnnnnnnnnnnnnnnnnnnnnnnnnnnnnnnnnnnnnnnnnnnnnnnnnnnnnnnnnnnnnnnnnnnnnnnnnnnnnnnnnnnnnnnnnnnnnnnnnnnnnnnnnnnnnnnnnnnnnnnnnnnnnnnnnnnnnnnnnnnnnnnnnnnnnnnnnnnnnnnnnnnnnnnnnnnnnnnnnnnnnnnnnnnnnnnnnnnnnnnnnnnnnnnnnnnnnnnnnnnnnnnnnnnnnnnnnnnnnnnnnnnnnnnnnnnnnnnnnnnnnnnnnnnnnnnnnnnnnnnnnnnnnnnnnnnnnnnnnnnnnnnnnnnnnnnnnnnnnnnnnnnnnnnnnnnnnnnnnnnnnnnnnnnnnnnnnnnnnnnnnnnnnnnnnnnnnnnnnnnnnnnnnnnnnnnnnnnnnnnnnnnnnnnnnnnnnnnnnnnnnnnnnnnnnnnnnnnnnnnnnnnnnnnnnnnnnnnnnnnnnnnnnnnnnnnnnnnnnnnnnnnnnnnnnnnnnnnnnnnnnnnnnnnnnnnnnnnnnnnnnnnnnnnnnnnnnnnnnnnnnnnnnnnnnnnnnnnnnnnnnnnnnnnnnnnnnnnnnnnnnnnnnnnnnnnnnnnnnnnnnnnnnnnnnnnnnnnnnnnnnnnnnnnnnnnnnnnnnnnnnnnnnnnnnnnnnnnnnnnnnnnnnnnnnnnnnnnnnnnnnnnnnnnnnnnnnnnnnnnnnnnnnnnnnnnnnnnnnnnnnnnnnnnnnnnnnnnnnnnnnnnnnnnnnnnnnnnnnnnnnnnnnnnnnnnnnnnnnnnnnnnnnnnnnnnnnnnnnnnnnnnnnnnnnnnnnnnnnnnnnnnnnnnnnnnnnnnnnnnnnnnnnnnnnnnnnnnnnnnnnnnnnnnnnnnnnnnnnnnnnnnnnnnnnnnnnnnnnnnnnnnnnnnnnnnnnnnnnnnnnnnnnnnnnnnnnnnnnnnnnnnnnnnnnnnnnnnnnnnnnnnnnnnnnnnnnnnnnnnnnnnnnnnnnnnnnnnnnnnnnnnnnnnnnnnnnnnnnnnnnnnnnnnnnnnnnnnnnnnnnnnnnnnnnnnnnnnnnnnnnnnnnnnnnnnnnnnnnnnnnnnnnnnnnnnnnnnnnnnnnnnnnnnnnnnnnnnnnnnnnnnnnnnnnnnnnnnnnnnnnnnnnnnnnnnnnnnnnnnnnnnnnnnnnnnnnnnnnnnnnnnnnnnnnnnnnnnnnnnnnnnnnnnnnnnnnnnnnnnnnnnnnnnnnnnnnnnnnnnnnnnnnnnnnnnnnnnnnnnnnnnnnnnnnnnnnnnnnnnnnnnnnnnnnnnnnnnnnnnnnnnnnnnnnnnnnnnnnnnnnnnnnnnnnnnnnnnnnnnnnnnnnnnnnnnnnnnnnnnnnnnnnnnnnnnnnnnnnnnnnnnnnnnnnnnnnnnnnnnnnnnnnnnnnnnnnnnnnnnnnnnnnnnnnnnnnnnnnnnnnnnnnnnnnnnnnnnnnnnnnnnnnnnnnnnnnnnnnnnnnnnnnnnnnnnnnnnnnnnnnnnnnnnnnnnnnnnnnnnnnnnnnnnnnnnnnnnnnnnnnnnnnnnnnnnnnnnnnnnnnnnnnnnnnnnnnnnnnnnnnnnnnnnnnnnnnnnnnnnnnnnnnnnnnnnnnnnnnnnnnnnnnnnnnnnnnnnnnnnnnnnnnnnnnnnnnnnnnnnnnnnnnnnnnnnnnnnnnnnnnnnnnnnnnnnnnnnnnnnnnnnnnnnnnnnnnnnnnnnnnnnnnnnnnnnnnnnnnnnnnnnnnnnnnnnnnnnnnnnnnnnnnnnnnnnnnnnnnnnnnnnnnnnnnnnnnnnnnnnnnnnnnnnnnnnnnnnnnnnnnnnnnnnnnnnnnnnnnnnnnnnnnnnnnnnnnnnnnnnnnnnnnnnnnnnnnnnnnnnnnnnnnnnnnnnnnnnnnnnnnnnnnnnnnnnnnnnnnnnnnnnnnnnnnnnnnnnnnnnnnnnnnnnnnnnnnnnnnnnnnnnnnnnnnnnnnnnnnnnnnnnnnnnnnnnnnnnnnnnnnnnnnnnnnnnnnnnnnnnnnnnnnnnnnnnnnnnnnnnnnnnnnnnnnnnnnnnnnnnnnnnnnnnnnnnnnnnnnnnnnnnnnnnnnnnnnnnnnnnnnnnnnnnnnnnnnnnnnnnnnnnnnnnnnnnnnnnnnnnnnnnnnnnnnnnnnnnnnnnnnnnnnnnnnnnnnnnnnnnnnnnnnnnnnnnnnnnnnnnnnnnnnnnnnnnnnnnnnnnnnnnnnnnnnnnnnnnnnnnnnnnnnnnnnnnnnnnnnnnnnnnnnnnnnnnnnnnnnnnnnnnnnnnnnnnnnnnnnnnnnnnnnnnnnnnnnnnnnnnnnnnnnnnnnnnnnnnnnnnnnnnnnnnnnnnnnnnnnnnnnnnnnnnnnnnnnnnnnnnnnnnnnnnnnnnnnnnnnnnnnnnnnnnnnnnnnnnnnnnnnnnnnnnnnnnnnnnnnnnnnnnnnnnnnnnnnnnnnnnnnnnnnnnnnnnnnnnnnnnnnnnnnnnnnnnnnnnnnnnnnnnnnnnnnnnnnnnnnnnnnnnnnnnnnnnnnnnnnnnnnnnnnnnnnnnnnnnnnnnnnnnnnnnnnnnnnnnnnnnnnnnnnnnnnnnnnnnnnnnnnnnnnnnnnnnnnnnnnnnnnnnnnnnnnnnnnnnnnnnnnnnnnnnnnnnnnnnnnnnnnnnnnnnnnnnnnnnnnnnnnnnnnnnnnnnnnnnnnnnnnnnnnnnnnnnnnnnnnnnnnnnnnnnnnnnnnnnnnnnnnnnnnnnnnnnnnnnnnnnnnnnnnnnnnnnnnnnnnnnnnnnnnnnnnnnnnnnnnnnnnnnnnnnnnnnnnnnnnnnnnnnnnnnnnnnnnnnnnnnnnnnnnnnnnnnnnnnnnnnnnnnnnnnnnnnnnnnnnnnnnnnnnnnnnnnnnnnnnnnnnnnnnnnnnnnnnnnnnnnnnnnnnnnnnnnnnnnnnnnnnnnnnnnnnnnnnnnnnnnnnnnnnnnnnnnnnnnnnnnnnnnnnnnnnnnnnnnnnnnnnnnnnnnnnnnnnnnnnnnnnnnnnnnnnnnnnnnnnnnnnnnnnnnnnnnnnnnnnnnnnnnnnnnnnnnnnnnnnnnnnnnnnnnnnnnnnnnnnnnnnnnnnnnnnnnnnnnnnnnnnnnnnnnnnnnnnnnnnnnnnnnnnnnnnnnnnnnnnnnnnnnnnnnnnnnnnnnnnnnnnnnnnnnnnnnnnnnnnnnnnnnnnnnnnnnnnnnnnnnnnnnnnnnnnnnnnnnnnnnnnnnnnnnnnnnnnnnnnnnnnnnnnnnnnnnnnnnnnnnnnnnnnnnnnnnnnnnnnnnnnnnnnnnnnnnnnnnnnnnnnnnnnnnnnnnnnnnnnnnnnnnnnnnnnnnnnnnnnnnnnnnnnnnnnnnnnnnnnnnnnnnnnnnnnnnnnnnnnnnnnnnnnnnnnnnnnnnnnnnnnnnnnnnnnnnnnnnnnnnnnnnnnnnnnnnnnnnnnnnnnnnnnnnnnnnnnnnnnnnnnnnnnnnnnnnnnnnnnnnnnnnnnnnnnnnnnnnnnnnnnnnnnnnnnnnnnnnnnnnnnnnnnnnnnnnnnnnnnnnnnnnnnnnnnnnnnnnnnnnnnnnnnnnnnnnnnnnnnnnnnnnnnnnnnnnnnnnnnnnnnnnnnnnnnnnnnnnnnnnnnnnnnnnnnnnnnnnnnnnnnnnnnnnnnnnnnnnnnnnnnnnnnnnnnnnnnnnnnnnnnnnnnnnnnnnnnnnnnnnnnnnnnnnnnnnnnnnnnnnnnnnnnnnnnnnnnnnnnnnnnnnnnnnnnnnnnnnnnnnnnnnnnnnnnnnnnnnnnnnnnnnnnnnnnnnnnnnnnnnnnnnnnnnnnnnnnnnnnnnnnnnnnnnnnnnnnnnnnnnnnnnnnnnnnnnnnnnnnnnnnnnnnnnnnnnnnnnnnnnnnnnnnnnnnnnnnnnnnnnnnnnnnnnnnnnnnnnnnnnnnnnnnnnnnnnnnnnnnnnnnnnnnnnnnnnnnnnnnnnnnnnnnnnnnnnnnnnnnnnnnnnnnnnnnnnnnnnnnnnnnnnnnnnnnnnnnnnnnnnnnnnnnnnnnnnnnnnnnnnnnnnnnnnnnnnnnnnnnnnnnnnnnnnnnnnnnnnnnnnnnnnnnnnnnnnnnnnnnnnnnnnnnnnnnnnnnnnnnnnnnnnnnnnnnnnnnnnnnnnnnnnnnnnnnnnnnnnnnnnnnnnnnnnnnnnnnnnnnnnnnnnnnnnnnnnnnnnnnnnnnnnnnnnnnnnnnnnnnnnnnnnnnnnnnnnnnnnnnnnnnnnnnnnnnnnnnnnnnnnnnnnnnnnnnnnnnnnnnnnnnnnnnnnnnnnnnnnnnnnnnnnnnnnnnnnnnnnnnnnnnnnnnnnnnnnnnnnnnnnnnnnnnnnnnnnnnnnnnnnnnnnnnnnnnnnnnnnnnnnnnnnnnnnnnnnnnnnnnnnnnnnnnnnnnnnnnnnnnnnnnnnnnnnnnnnnnnnnnnnnnnnnnnnnnnnnnnnnnnnnnnnnnnnnnnnnnnnnnnnnnnnnnnnnnnnnnnnnnnnnnnnnnnnnnnnnnnnnnnnnnnnnnnnnnnnnnnnnnnnnnnnnnnnnnnnnnnnnnnnnnnnnnnnnnnnnnnnnnnnnnnnnnnnnnnnnnnnnnnnnnnnnnnnnnnnnnnnnnnnnnnnnnnnnnnnnnnnnnnnnnnnnnnnnnnnnnnnnnnnnnnnnnnnnnnnnnnnnnnnnnnnnnnnnnnnnnnnnnnnnnnnnnnnnnnnnnnnnnnnnnnnnnnnnnnnnnnnnnnnnnnnnnnnnnnnnnnnnnnnnnnnnnnnnnnnnnnnnnnnnnnnnnnnnnnnnnnnnnnnnnnnnnnnnnnnnnnnnnnnnnnnnnnnnnnnnnnnnnnnnnnnnnnnnnnnnnnnnnnnnnnnnnnnnnnnnnnnnnnnnnnnnnnnnnnnnnnnnnnnnnnnnnnnnnnnnnnnnnnnnnnnnnnnnnnnnnnnnnnnnnnnnnnnnnnnnnnnnnnnnnnnnnnnnnnnnnnnnnnnnnnnnnnnnnnnnnnnnnnnnnnnnnnnnnnnnnnnnnnnnnnnnnnnnnnnnnnnnnnnnnnnnnnnnnnnnnnnnnnnnnnnnnnnnnnnnnnnnnnnnnnnnnnnnnnnnnnnnnnnnnnnnnnnnnnnnnnnnnnnnnnnnnnnnnnnnnnnnnnnnnnnnnnnnnnnnnnnnnnnnnnnnnnnnnnnnnnnnnnnnnnnnnnnnnnnnnnnnnnnnnnnnnnnnnnnnnnnnnnnnnnnnnnnnnnnnnnnnnnnnnnnnnnnnnnnnnnnnnnnnnnnnnnnnnnnnnnnnnnnnnnnnnnnnnnnnnnnnnnnnnnnnnnnnnnnnnnnnnnnnnnnnnnnnnnnnnnnnnnnnnnnnnnnnnnnnnnnnnnnnnnnnnnnnnnnnnnnnnnnnnnnnnnnnnnnnnnnnnnnnnnnnnnnnnnnnnnnnnnnnnnnnnnnnnnnnnnnnnnnnnnnnnnnnnnnnnnnnnnnnnnnnnnnnnnnnnnnnnnnnnnnnnnnnnnnnnnnnnnnnnnnnnnnnnnnnnnnnnnnnnnnnnnnnnnnnnnnnnnnnnnnnnnnnnnnnnnnnnnnnnnnnnnnnnnnnnnnnnnnnnnnnnnnnnnnnnnnnnnnnnnnnnnnnnnnnnnnnnnnnnnnnnnnnnnnnnnnnnnnnnnnnnnnnnnnnnnnnnnnnnnnnnnnnnnnnnnnnnnnnnnnnnnnnnnnnnnnnnnnnnnnnnnnnnnnnnnnnnnnnnnnnnnnnnnnnnnnnnnnnnnnnnnnnnnnnnnnnnnnnnnnnnnnnnnnnnnnnnnnnnnnnnnnnnnnnnnnnnnnnnnnnnnnnnnnnnnnnnnnnnnnnnnnnnnnnnnnnnnnnnnnnnnnnnnnnnnnnnnnnnnnnnnnnnnnnnnnnnnnnnnnnnnnnnnnnnnnnnnnnnnnnnnnnnnnnnnnnnnnnnnnnnnnnnnnnnnnnnnnnnnnnnnnnnnnnnnnnnnnnnnnnnnnnnnnnnnnnnnnnnnnnnnnnnnnnnnnnnnnnnnnnnnnnnnnnnnnnnnnnnnnnnnnnnnnnnnnnnnnnnnnnnnnnnnnnnnnnnnnnnnnnnnnnnnnnnnnnnnnnnnnnnnnnnnnnnnnnnnnnnnnnnnnnnnnnnnnnnnnnnnnnnnnnnnnnnnnnnnnnnnnnnnnnnnnnnnnnnnnnnnnnnnnnnnnnnnnnnnnnnnnnnnnnnnnnnnnnnnnnnnnnnnnnnnnnnnnnnnnnnnnnnnnnnnnnnnnnnnnnnnnnnnnnnnnnnnnnnnnnnnnnnnnnnnnnnnnnnnnnnnnnnnnnnnnnnnnnnnnnnnnnnnnnnnnnnnnnnnnnnnnnnnnnnnnnnnnnnnnnnnnnnnnnnnnnnnnnnnnnnnnnnnnnnnnnnnnnnnnnnnnnnnnnnnnnnnnnnnnnnnnnnnnnnnnnnnnnnnnnnnnnnnnnnnnnnnnnnnnnnnnnnnnnnnnnnnnnnnnnnnnnnnnnnnnnnnnnnnnnnnnnnnnnnnnnnnnnnnnnnnnnnnnnnnnnnnnnnnnnnnnnnnnnnnnnnnnnnnnnnnnnnnnnnnnnnnnnnnnnnnnnnnnnnnnnnnnnnnnnnnnnnnnnnnnnnnnnnnnnnnnnnnnnnnnnnnnnnnnnnnnnnnnnnnnnnnnnnnnnnnnnnnnnnnnnnnnnnnnnnnnnnnnnnnnnnnnnnnnnnnnnnnnnnnnnnnnnnnnnnnnnnnnnnnnnnnnnnnnnnnnnnnnnnnnnnnnnnnnnnnnnnnnnnnnnnnnnnnnnnnnnnnnnnnnnnnnnnnnnnnnnnnnnnnnnnnnnnnnnnnnnnnnnnnnnnnnnnnnnnnnnnnnnnnnnnnnnnnnnnnnnnnnnnnnnnnnnnnnnnnnnnnnnnnnnnnnnnnnnnnnnnnnnnnnnnnnnnnnnnnnnnnnnnnnnnnnnnnnnnnnnnnnnnnnnnnnnnnnnnnnnnnnnnnnnnnnnnnnnnnnnnnnnnnnnnnnnnnnnnnnnnnnnnnnnnnnnnnnnnnnnnnnnnnnnnnnnnnnnnnnnnnnnnnnnnnnnnnnnnnnnnnnnnnnnnnnnnnnnnnnnnnnnnnnnnnnnnnnnnnnnnnnnnnnnnnnnnnnnnnnnnnnnnnnnnnnnnnnnnnnnnnnnnnnnnnnnnnnnnnnnnnnnnnnnnnnnnnnnnnnnnnnnnnnnnnnnnnnnnnnnnnnnnnnnnnnnnnnnnnnnnnnnnnnnnnnnnnnnnnnnnnnnnnnnnnnnnnnnnnnnnnnnnnnnnnnnnnnnnnnnnnnnnnnnnnnnnnnnnnnnnnnnnnnnnnnnnnnnnnnnnnnnnnnnnnnnnnnnnnnnnnnnnnnnnnnnnnnnnnnnnnnnnnnnnnnnnnnnnnnnnnnnnnnnnnnnnnnnnnnnnnnnnnnnnnnnnnnnnnnnnnnnnnnnnnnnnnnnnnnnnnnnnnnnnnnnnnnnnnnnnnnnnnnnnnnnnnnnnnnnnnnnnnnnnnnnnnnnnnnnnnnnnnnnnnnnnnnnnnnnnnnnnnnnnnnnnnnnnnnnnnnnnnnnnnnnnnnnnnnnnnnnnnnnnnnnnnnnnnnnnnnnnnnnnnnnnnnnnnnnnnnnnnnnnnnnnnnnnnnnnnnnnnnnnnnnnnnnnnnnnnnnnnnnnnnnnnnnnnnnnnnnnnnnnnnnnnnnnnnnnnnnnnnnnnnnnnnnnnnnnnnnnnnnnnnnnnnnnnnnnnnnnnnnnnnnnnnnnnnnnnnnnnnnnnnnnnnnnnnnnnnnnnnnnnnnnnnnnnnnnnnnnnnnnnnnnnnnnnnnnnnnnnnnnnnnnnnnnnnnnnnnnnnnnnnnnnnnnnnnnnnnnnnnnnnnnnnnnnnnnnnnnnnnnnnnnnnnnnnnnnnnnnnnnnnnnnnnnnnnnnnnnnnnnnnnnnnnnnnnnnnnnnnnnnnnnnnnnnnnnnnnnnnnnnnnnnnnnnnnnnnnnnnnnnnnnnnnnnnnnnnnnnnnnnnnnnnnnnnnnnnnnnnnnnnnnnnnnnnnnnnnnnnnnnnnnnnnnnnnnnnnnnnnnnnnnnnnnnnnnnnnnnnnnnnnnnnnnnnnnnnnnnnnnnnnnnnnnnnnnnnnnnnnnnnnnnnnnnnnnnnnnnnnnnnnnnnnnnnnnnnnnnnnnnnnnnnnnnnnnnnnnnnnnnnnnnnnnnnnnnnnnnnnnnnnnnnnnnnnnnnnnnnnnnnnnnnnnnnnnnnnnnnnnnnnnnnnnnnnnnnnnnnnnnnnnnnnnnnnnnnnnnnnnnnnnnnnnnnnnnnnnnnnnnnnnnnnnnnnnnnnnnnnnnnnnnnnnnnnnnnnnnnnnnnnnnnnnnnnnnnnnnnnnnnnnnnnnnnnnnnnnnnnnnnnnnnnnnnnnnnnnnnnnnnnnnnnnnnnnnnnnnnnnnnnnnnnnnnnnnnnnnnnnnnnnnnnnnnnnnnnnnnnnnnnnnnnnnnnnnnnnnnnnnnnnnnnnnnnnnnnnnnnnnnnnnnnnnnnnnnnnnnnnnnnnnnnnnnnnnnnnnnnnnnnnnnnnnnnnnnnnnnnnnnnnnnnnnnnnnnnnnnnnnnnnnnnnnnnnnnnnnnnnnnnnnnnnnnnnnnnnnnnnnnnnnnnnnnnnnnnnnnnnnnnnnnnnnnnnnnnnnnnnnnnnnnnnnnnnnnnnnnnnnnnnnnnnnnnnnnnnnnnnnnnnnnnnnnnnnnnnnnnnnnnnnnnnnnnnnnnnnnnnnnnnnnnnnnnnnnnnnnnnnnnnnnnnnnnnnnnnnnnnnnnnnnnnnnnnnnnnnnnnnnnnnnnnnnnnnnnnnnnnnnnnnnnnnnnnnnnnnnnnnnnnnnnnnnnnnnnnnnnnnnnnnnnnnnnnnnnnnnnnnnnnnnnnnnnnnnnnnnnnnnnnnnnnnnnnnnnnnnnnnnnnnnnnnnnnnnnnnnnnnnnnnnnnnnnnnnnnnnnnnnnnnnnnnnnnnnnnnnnnnnnnnnnnnnnnnnnnnnnnnnnnnnnnnnnnnnnnnnnnnnnnnnnnnnnnnnnnnnnnnnnnnnnnnnnnnnnnnnnnnnnnnnnnnnnnnnnnnnnnnnnnnnnnnnnnnnnnnnnnnnnnnnnnnnnnnnnnnnnnnnnnnnnnnnnnnnnnnnnnnnnnnnnnnnnnnnnnnnnnnnnnnnnnnnnnnnnnnnnnnnnnnnnnnnnnnnnnnnnnnnnnnnnnnnnnnnnnnnnnnnnnnnnnnnnnnnnnnnnnnnnnnnnnnnnnnnnnnnnnnnnnnnnnnnnnnnnnnnnnnnnnnnnnnnnnnnnnnnnnnnnnnnnnnnnnnnnnnnnnnnnnnnnnnnnnnnnnnnnnnnnnnnnnnnnnnnnnnnnnnnnnnnnnnnnnnnnnnnnnnnnnnnnnnnnnnnnnnnnnnnnnnnnnnnnnnnnnnnnnnnnnnnnnnnnnnnnnnnnnnnnnnnnnnnnnnnnnnnnnnnnnnnnnnnnnnnnnnnnnnnnnnnnnnnnnnnnnnnnnnnnnnnnnnnnnnnnnnnnnnnnnnnnnnnnnnnnnnnnnnnnnnnnnnnnnnnnnnnnnnnnnnnnnnnnnnnnnnnnnnnnnnnnnnnnnnnnnnnnnnnnnnnnnnnnnnnnnnnnnnnnnnnnnnnnnnnnnnnnnnnnnnnnnnnnnnnnnnnnnnnnnnnnnnnnnnnnnnnnnnnnnnnnnnnnnnnnnnnnnnnnnnnnnnnnnnnnnnnnnnnnnnnnnnnnnnnnnnnnnnnnnnnnnnnnnnnnnnnnnnnnnnnnnnnnnnnnnnnnnnnnnnnnnnnnnnnnnnnnnnnnnnnnnnnnnnnnnnnnnnnnnnnnnnnnnnnnnnnnnnnnnnnnnnnnnnnnnnnnnnnnnnnnnnnnnnnnnnnnnnnnnnnnnnnnnnnnnnnnnnnnnnnnnnnnnnnnnnnnnnnnnnnnnnnnnnnnnnnnnnnnnnnnnnnnnnnnnnnnnnnnnnnnnnnnnnnnnnnnnnnnnnnnnnnnnnnnnnnnnnnnnnnnnnnnnnnnnnnnnnnnnnnnnnnnnnnnnnnnnnnnnnnnnnnnnnnnnnnnnnnnnnnnnnnnnnnnnnnnnnnnnnnnnnnnnnnnnnnnnnnnnnnnnnnnnnnnnnnnnnnnnnnnnnnnnnnnnnnnnnnnnnnnnnnnnnnnnnnnnnnnnnnnnnnnnnnnnnnnnnnnnnnnnnnnnnnnnnnnnnnnnnnnnnnnnnnnnnnnnnnnnnnnnnnnnnnnnnnnnnnnnnnnnnnnnnnnnnnnnnnnnnnnnnnnnnnnnnnnnnnnnnnnnnnnnnnnnnnnnnnnnnnnnnnnnnnnnnnnnnnnnnnnnnnnnnnnnnnnnnnnnnnnnnnnnnnnnnnnnnnnnnnnnnnnnnnnnnnnnnnnnnnnnnnnnnnnnnnnnnnnnnnnnnnnnnnnnnnnnnnnnnnnnnnnnnnnnnnnnnnnnnnnnnnnnnnnnnnnnnnnnnnnnnnnnnnnnnnnnnnnnnnnnnnnnnnnnnnnnnnnnnnnnnnnnnnnnnnnnnnnnnnnnnnnnnnnnnnnnnnnnnnnnnnnnnnnnnnnnnnnnnnnnnnnnnnnnnnnnnnnnnnnnnnnnnnnnnnnnnnnnnnnnnnnnnnnnnnnnnnnnnnnnnnnnnnnnnnnnnnnnnnnnnnnnnnnnnnnnnnnnnnnnnnnnnnnnnnnnnnnnnnnnnnnnnnnnnnnnnnnnnnnnnnnnnnnnnnnnnnnnnnnnnnnnnnnnnnnnnnnnnnnnnnnnnnnnnnnnnnnnnnnnnnnnnnnnnnnnnnnnnnnnnnnnnnnnnnnnnnnnnnnnnnnnnnnnnnnnnnnnnnnnnnnnnnnnnnnnnnnnnnnnnnnnnnnnnnnnnnnnnnnnnnnnnnnnnnnnnnnnnnnnnnnnnnnnnnnnnnnnnnnnnnnnnnnnnnnnnnnnnnnnnnnnnnnnnnnnnnnnnnnnnnnnnnnnnnnnnnnnnnnnnnnnnnnnnnnnnnnnnnnnnnnnnnnnnnnnnnnnnnnnnnnnnnnnnnnnnnnnnnnnnnnnnnnnnnnnnnnnnnnnnnnnnnnnnnnnnnnnnnnnnnnnnnnnnnnnnnnnnnnnnnnnnnnnnnnnnnnnnnnnnnnnnnnnnnnnnnnnnnnnnnnnnnnnnnnnnnnnnnnnnnnnnnnnnnnnnnnnnnnnnnnnnnnnnnnnnnnnnnnnnnnnnnnnnnnnnnnnnnnnnnnnnnnnnnnnnnnnnnnnnnnnnnnnnnnnnnnnnnnnnnnnnnnnnnnnnnnnnnnnnnnnnnnnnnnnnnnnnnnnnnnnnnnnnnnnnnnnnnnnnnnnnnnnnnnnnnnnnnnnnnnnnnnnnnnnnnnnnnnnnnnnnnnnnnnnnnnnnnnnnnnnnnnnnnnnnnnnnnnnnnnnnnnnnnnnnnnnnnnnnnnnnnnnnnnnnnnnnnnnnnnnnnnnnnnnnnnnnnnnnnnnnnnnnnnnnnnnnnnnnnnnnnnnnnnnnnnnnnnnnnnnnnnnnnnnnnnnnnnnnnnnnnnnnnnnnnnnnnnnnnnnnnnnnnnnnnnnnnnnnnnnnnnnnnnnnnnnnnnnnnnnnnnnnnnnnnnnnnnnnnnnnnnnnnnnnnnnnnnnnnnnnnnnnnnnnnnnnnnnnnnnnnnnnnnnnnnnnnnnnnnnnnnnnnnnnnnnnnnnnnnnnnnnnnnnnnnnnnnnnnnnnnnnnnnnnnnnnnnnnnnnnnnnnnnnnnnnnnnnnnnnnnnnnnnnnnnnnnnnnnnnnnnnnnnnnnnnnnnnnnnnnnnnnnnnnnnnnnnnnnnnnnnnnnnnnnnnnnnnnnnnnnnnnnnnnnnnnnnnnnnnnnnnnnnnnnnnnnnnnnnnnnnnnnnnnnnnnnnnnnnnnnnnnnnnnnnnnnnnnnnnnnnnnnnnnnnnnnnnnnnnnnnnnnnnnnnnnnnnnnnnnnnnnnnnnnnnnnnnnnnnnnnnnnnnnnnnnnnnnnnnnnnnnnnnnnnnnnnnnnnnnnnnnnnnnnnnnnnnnnnnnnnnnnnnnnnnnnnnnnnnnnnnnnnnnnnnnnnnnnnnnnnnnnnnnnnnnnnnnnnnnnnnnnnnnnnnnnnnnnnnnnnnnnnnnnnnnnnnnnnnnnnnnnnnnnnnnnnnnnnnnnnnnnnnnnnnnnnnnnnnnnnnnnnnnnnnnnnnnnnnnnnnnnnnnnnnnnnnnnnnnnnnnnnnnnnnnnnnnnnnnnnnnnnnnnnnnnnnnnnnnnnnnnnnnnnnnnnnnnnnnnnnnnnnnnnnnnnnnnnnnnnnnnnnnnnnnnnnnnnnnnnnnnnnnnnnnnnnnnnnnnnnnnnnnnnnnnnnnnnnnnnnnnnnnnnnnnnnnnnnnnnnnnnnnnnnnnnnnnnnnnnnnnnnnnnnnnnnnnnnnnnnnnnnnnnnnnnnnnnnnnnnnnnnnnnnnnnnnnnnnnnnnnnnnnnnnnnnnnnnnnnnnnnnnnnnnnnnnnnnnnnnnnnnnnnnnnnnnnnnnnnnnnnnnnnnnnnnnnnnnnnnnnnnnnnnnnnnnnnnnnnnnnnnnnnnnnnnnnnnnnnnnnnnnnnnnnnnnnnnnnnnnnnnnnnnnnnnnnnnnnnnnnnnnnnnnnnnnnnnnnnnnnnnnnnnnnnnnnnnnnnnnnnnnnnnnnnnnnnnnnnnnnnnnnnnnnnnnnnnnnnnnnnnnnnnnnnnnnnnnnnnnnnnnnnnnnnnnnnnnnnnnnnnnnnnnnnnnnnnnnnnnnnnnnnnnnnnnnnnnnnnnnnnnnnnnnnnnnnnnnnnnnnnnnnnnnnnnnnnnnnnnnnnnnnnnnnnnnnnnnnnnnnnnnnnnnnnnnnnnnnnnnnnnnnnnnnnnnnnnnnnnnnnnnnnnnnnnnnnnnnnnnnnnnnnnnnnnnnnnnnnnnnnnnnnnnnnnnnnnnnnnnnnnnnnnnnnnnnnnnnnnnnnnnnnnnnnnnnnnnnnnnnnnnnnnnnnnnnnnnnnnnnnnnnnnnnnnnnnnnnnnnnnnnnnnnnnnnnnnnnnnnnnnnnnnnnnnnnnnnnnnnnnnnnnnnnnnnnnnnnnnnnnnnnnnnnnnnnnnnnnnnnnnnnnnnnnnnnnnnnnnnnnnnnnnnnnnnnnnnnnnnnnnnnnnnnnnnnnnnnnnnnnnnnnnnnnnnnnnnnnnnnnnnnnnnnnnnnnnnnnnnnnnnnnnnnnnnnnnnnnnnnnnnnnnnnnnnnnnnnnnnnnnnnnnnnnnnnnnnnnnnnnnnnnnnnnnnnnnnnnnnnnnnnnnnnnnnnnnnnnnnnnnnnnnnnnnnnnnnnnnnnnnnnnnnnnnnnnnnnnnnnnnnnnnnnnnnnnnnnnnnnnnnnnnnnnnnnnnnnnnnnnnnnnnnnnnnnnnnnnnnnnnnnnnnnnnnnnnnnnnnnnnnnnnnnnnnnnnnnnnnnnnnnnnnnnnnnnnnnnnnnnnnnnnnnnnnnnnnnnnnnnnnnnnnnnnnnnnnnnnnnnnnnnnnnnnnnnnnnnnnnnnnnnnnnnnnnnnnnnnnnnnnnnnnnnnnnnnnnnnnnnnnnnnnnnnnnnnnnnnnnnnnnnnnnnnnnnnnnnnnnnnnnnnnnnnnnnnnnnnnnnnnnnnnnnnnnnnnnnnnnnnnnnnnnnnnnnnnnnnnnnnnnnnnnnnnnnnnnnnnnnnnnnnnnnnnnnnnnnnnnnnnnnnnnnnnnnnnnnnnnnnnnnnnnnnnnnnnnnnnnnnnnnnnnnnnnnnnnnnnnnnnnnnnnnnnnnnnnnnnnnnnnnnnnnnnnnnnnnnnnnnnnnnnnnnnnnnnnnnnnnnnnnnnnnnnnnnnnnnnnnnnnnnnnnnnnnnnnnnnnnnnnnnnnnnnnnnnnnnnnnnnnnnnnnnnnnnnnnnnnnnnnnnnnnnnnnnnnnnnnnnnnnnnnnnnnnnnnnnnnnnnnnnnnnnnnnnnnnnnnnnnnnnnnnnnnnnnnnnnnnnnnnnnnnnnnnnnnnnnnnnnnnnnnnnnnnnnnnnnnnnnnnnnnnnnnnnnnnnnnnnnnnnnnnnnnnnnnnnnnnnnnnnnnnnnnnnnnnnnnnnnnnnnnnnnnnnnnnnnnnnnnnnnnnnnnnnnnnnnnnnnnnnnnnnnnnnnnnnnnnnnnnnnnnnnnnnnnnnnnnnnnnnnnnnnnnnnnnnnnnnnnnnnnnnnnnnnnnnnnnnnnnnnnnnnnnnnnnnnnnnnnnnnnnnnnnnnnnnnnnnnnnnnnnnnnnnnnnnnnnnnnnnnnnnnnnnnnnnnnnnnnnnnnnnnnnnnnnnnnnnnnnnnnnnnnnnnnnnnnnnnnnnnnnnnnnnnnnnnnnnnnnnnnnnnnnnnnnnnnnnnnnnnnnnnnnnnnnnnnnnnnnnnnnnnnnnnnnnnnnnnnnnnnnnnnnnnnnnnnnnnnnnnnnnnnnnnnnnnnnnnnnnnnnnnnnnnnnnnnnnnnnnnnnnnnnnnnnnnnnnnnnnnnnnnnnnnnnnnnnnnnnnnnnnnnnnnnnnnnnnnnnnnnnnnnnnnnnnnnnnnnnnnnnnnnnnnnnnnnnnnnnnnnnnnnnnnnnnnnnnnnnnnnnnnnnnnnnnnnnnnnnnnnnnnnnnnnnnnnnnnnnnnnnnnnnnnnnnnnnnnnnnnnnnnnnnnnnnnnnnnnnnnnnnnnnnnnnnnnnnnnnnnnnnnnnnnnnnnnnnnnnnnnnnnnnnnnnnnnnnnnnnnnnnnnnnnnnnnnnnnnnnnnnnnnnnnnnnnnnnnnnnnnnnnnnnnnnnnnnnnnnnnnnnnnnnnnnnnnnnnnnnnnnnnnnnnnnnnnnnnnnnnnnnnnnnnnnnnnnnnnnnnnnnnnnnnnnnnnnnnnnnnnnnnnnnnnnnnnnnnnnnnnnnnnnnnnnnnnnnnnnnnnnnnnnnnnnnnnnnnnnnnnnnnnnnnnnnnnnnnnnnnnnnnnnnnnnnnnnnnnnnnnnnnnnnnnnnnnnnnnnnnnnnnnnnnnnnnnnnnnnnnnnnnnnnnnnnnnnnnnnnnnnnnnnnnnnnnnnnnnnnnnnnnnnnnnnnnnnnnnnnnnnnnnnnnnnnnnnnnnnnnnnnnnnnnnnnnnnnnnnnnnnnnnnnnnnnnnnnnnnnnnnnnnnnnnnnnnnnnnnnnnnnnnnnnnnnnnnnnnnnnnnnnnnnnnnnnnnnnnnnnnnnnnnnnnnnnnnnnnnnnnnnnnnnnnnnnnnnnnnnnnnnnnnnnnnnnnnnnnnnnnnnnnnnnnnnnnnnnnnnnnnnnnnnnnnnnnnnnnnnnnnnnnnnnnnnnnnnnnnnnnnnnnnnnnnnnnnnnnnnnnnnnnnnnnnnnnnnnnnnnnnnnnnnnnnnnnnnnnnnnnnnnnnnnnnnnnnnnnnnnnnnnnnnnnnnnnnnnnnnnnnnnnnnnnnnnnnnnnnnnnnnnnnnnnnnnnnnnnnnnnnnnnnnnnnnnnnnnnnnnnnnnnnnnnnnnnnnnnnnnnnnnnnnnnnnnnnnnnnnnnnnnnnnnnnnnnnnnnnnnnnnnnnnnnnnnnnnnnnnnnnnnnnnnnnnnnnnnnnnnnnnnnnnnnnnnnnnnnnnnnnnnnnnnnnnnnnnnnnnnnnnnnnnnnnnnnnnnnnnnnnnnnnnnnnnnnnnnnnnnnnnnnnnnnnnnnnnnnnnnnnnnnnnnnnnnnnnnnnnnnnnnnnnnnnnnnnnnnnnnnnnnnnnnnnnnnnnnnnnnnnnnnnnnnnnnnnnnnnnnnnnnnnnnnnnnnnnnnnnnnnnnnnnnnnnnnnnnnnnnnnnnnnnnnnnnnnnnnnnnnnngcggttgcttggccgctgcacggcaatagtggcgcggccaccccacagcttgtgcactgtgttgcgatggcaactaaatcgtgctgcagcctccgagatggcccccgtggaagctttccacatgtggtcatgttagagaggaacagcacgatctccagcttcgtagcaagcgatagatattgagggttgctggtcttgggtactgtgtaccagttgtacccattaaccggttaacccgaaccggtccaatccgaacccacgttgattatggtgattacggtaagttgtttacgccaccgatgattagacgagtaggatgattggatgaacaccggtgagtgatggttgattagatgcactaggtgataggacgcagggtcgcgtgtctataacagtagggtgtaagctccaacaattcaatcactttcgaatcttcattctacccctcaagtgccttcgctccggtcccgccgtctgcgacgtccctccctccgcttcgtccgagcttcgtgtccaagatccataccttccatcaggttatgagcccaagcaccatgtcctctgcccaagacgcctcgaccaaggtctccattgacaagttcaacggggacaactacgcgacgtggaaccgctacatgcgtggcgtgttcctgaccaagtcgacgtggcatgtcgtgaaccgcgagacgacgccgagcttcacggactcgcgggccaaggacgactacgtcaagtcgagcaacatcgcgttcggactgatgttgctccacatggacgcggactaccaccatgtggtcgacgactgcgaggaagcgtgggttgcgtggacgcgcctgaagacgctgtacggtggttcgcagaaggctggacgcatctacctgaagcgccaactcttcagcatggagatgtcggaaggcggcaacgtcttgcatcattgcaacgaggtcctcaacatcagcgccaagctcagcagcatcggcgccaagatggaggatgaggacgtgtgttgcgcagcctccccaagagctacgagaacgtcgtgctgaacttggagatgagcagcgctgaactacgatcgcaagacgtcgtgaaggtgctgacgaatgagcacatcaagagacaaggcgagaagacggcgacggtgaagacggagaatgcggccaaggcgttcaacaccgaccgagagtctcgccagtgtacgtactgcgggaaattggggcacacgannnnnnnnnnnnnnnnnnnnnnnnnnnnnnnnnnnnnnnnnnnnnnnnnnnnnnnnnnnnnnnnnnnnnnnnnnnnnnnnnnnnnnnnnnnnnnnnnnnnnnnnnnnnnnnnnnnnnnnnnnnnnnnnnnnnnnnnnnnnnnnnnnnnnnnnnnnnnnnnnnnnnnnnnnnnnnnnnnnnnnnnnnnnnnnnnnnnnnnnnnnnnnnnnnnnnnnnnnnnnnnnnnnnnnnnnnnnnnnnnnnnnnnnnnnnnnnnnnnnnnnnnnnnnnnnnnnnnnnnnnnnnnnnnnnnnnnnnnnnnnnnnnnnnnnnnnnnnnnnnnnnnnnnnnnnnnnnnnnnnnnnnnnnnnnnnnnnnnnnnnnnnnnnnnnnnnnnnnnnnnnnnnnnnnnnnnnnnnnnnnnnnnnnnnnnnnnnnnnnnnnnnnnnnnnnnnnnnnnnnnnnnnnnnnnnnnnnnnnnnnnnnnnnnnnnnnnnnnnnnnnnnnnnnnnnnnnnnnnnnnnnnnnnnnnnnnnnnnnnnnnnnnnnnnnnnnnnnnnnnnnnnnnnnnnnnnnnnnnnnnnnnnnnnnnnnnnnnnnnnnnnnnnnnnnnnnnnnnnnnnnnnnnnnnnnnnnnnnnnnnnnnnnnnnnnnnnnnnnnnnnnnnnnnnnnnnnnnnnnnnnnnnnnnnnnnnnnnnnnnnnnnnnnnnnnnnnnnnnnnnnnnnnnnnnnnnnnnnnnnnnnnnnnnnnnnnnnnnnnnnnnnnnnnnnnnnnnnnnnnnnnnnnnnnnnnnnnnnnnnnnnnnnnnnnnnnnnnnnnnnnnnnnnnnnnnnnnnnnnnnnnnnnnnnnnnnnnnnnnnnnnnnnnnnnnnnnnnnnnnnnnnnnnnnnnnnnnnnnnnnnnnnnnnnnnnnnnnnnnnnnnnnnnnnnnnnnnnnnnnnnnnnnnnnnnnnnnnnnnnnnnnnnnnnnnnnnnnnnnnnnnnnnnnnnnnnnnnnnnnnnnnnnnnnnnnnnnnnnnnnnnnnnnnnnnnnnnnnnnnnnnnnnnnnnnnnnnnnnnnnnnnnnnnnnnnnnnnnnnnnnnnnnnnnnnnnnnnnnnnnnnnnnnnnnnnnnnnnnnnnnnnnnnnnnnnnnnnnnnnnnnnnnnnnnnnnnnnnnnnnnnnnnnnnnnnnnnnnnnnnnnnnnnnnnnnnnnnnnnnnnnnnnnnnnnnnnnnnnnnnnnnnnnnnnnnnnnnnnnnnnnnnnnnnnnnnnnnnnnnnnnnnnnnnnnnnnnnnnnnnnnnnnnnnnnnnnnnnnnnnnnnnnnnnnnnnnnnnnnnnnnnnnnnnnnnnnnnnnnnnnnnnnnnnnnnnnnnnnnnnnnnnnnnnnnnnnnnnnnnnnnnnnnnnnnnnnnnnnnnnnnnnnnnnnnnnnnnnnnnnnnnnnnnnnnnnnnnnnnnnnnnnnnnnnnnnnnnnnnnnnnnnnnnnnnnnnnnnnnnnnnnnnnnnnnnnnnnnnnnnnnnnnnnnnnnnnnnnnnnnnnnnnnnnnnnnnnnnnnnnnnnnnnnnnnnnnnnnnnnnnnnnnnnnnnnnnnnnnnnnnnnnnnnnnnnnnnnnnnnnnnnnnnnnnnnnnnnnnnnnnnnnnnnnnnnnnnnnnnnnnnnnnnnnnnnnnnnnnnnnnnnnnnnnnnnnnnnnnnnnnnnnnnnnnnnnnnnnnnnnnnnnnnnnnnnnnnnnnnnnnnnnnnnnnnnnnnnnnnnnnnnnnnnnnnnnnnnnnnnnnnnnnnnnnnnnnnnnnnnnnnnnnnnnnnnnnnnnnnnnnnnnnnnnnnnnnnnnnnnnnnnnnnnnnnnnnnnnnnnnnnnnnnnnnnnnnnnnnnnnnnnnnnnnnnnnnnnnnnnnnnnnnnnnnnnnnnnnnnnnnnnnnnnnnnnnnnnnnnnnnnnnnnnnnnnnnnnnnnnnnnnnnnnnnnnnnnnnnnnnnnnnnnnnnnnnnnnnnnnnnnnnnnnnnnnnnnnnnnnnnnnnnnnnnnnnnnnnnnnnnnnnnnnnnnnnnnnnnnnnnnnnnnnnnnnnnnnnnnnnnnnnnnnnnnnnnnnnnnnnnnnnnnnnnnnnnnnnnnnnnnnnnnnnnnnnnnnnnnnnnnnnnnnnnnnnnnnnnnnnnnnnnnnnnnnnnnnnnnnnnnnnnnnnnnnnnnnnnnnnnnnnnnnnnnnnnnnnnnnnnnnnnnnnnnnnnnnnnnnnnnnnnnnnnnnnnnnnnnnnnnnnnnnnnnnnnnnnnnnnnnnnnnnnnnnnnnnnnnnnnnnnnnnnnnnnnnnnnnnnnnnnnnnnnnnnnnnnnnnnnnnnnnnnnnnnnnnnnnnnnnnnnnnnnnnnnnnnnnnnnnnnnnnnnnnnnnnnnnnnnnnnnnnnnnnnnnnnnnnnnnnnnnnnnnnnnnnnnnnnnnnnnnnnnnnnnnnnnnnnnnnnnnnnnnnnnnnnnnnnnnnnnnnnnnnnnnnnnnnnnnnnnnnnnnnnnnnnnnnnnnnnnnnnnnnnnnnnnnnnnnnnnnnnnnnnnnnnnnnnnnnnnnnnnnnnnnnnnnnnnnnnnnnnnnnnnnnnnnnnnnnnnnnnnnnnnnnnnnnnnnnnnnnnnnnnnnnnnnnnnnnnnnnnnnnnnnnnnnnnnnnnnnnnnnnnnnnnnnnnnnnnnnnnnnnnnnnnnnnnnnnnnnnnnnnnnnnnnnnnnnnnnnnnnnnnnnnnnnnnnnnnnnnnnnnnnnnnnnnnnnnnnnnnnnnnnnnnnnnnnnnnnnnnnnnnnnnnnnnnnnnnnnnnnnnnnnnnnnnnnnnnnnnnnnnnnnnnnnnnnnnnnnnnnnnnnnnnnnnnnnnnnnnnnnnnnnnnnnnnnnnnnnnnnnnnnnnnnnnnnnnnnnnnnnnnnnnnnnnnnnnnnnnnnnnnnnnnnnnnnnnnnnnnnnnnnnnnnnnnnnnnnnnnnnnnnnnnnnnnnnnnnnnnnnnnnnnnnnnnnnnnnnnnnnnnnnnnnnnnnnnnnnnnnnnnnnnnnnnnnnnnnnnnnnnnnnnnnnnnnnnnnnnnnnnnnnnnnnnnnnnnnnnnnnnnnnnnnnnnnnnnnnnnnnnnnnnnnnnnnnnnnnnnnnnnnnnnnnnnnnnnnnnnnnnnnnnnnnnnnnnnnnnnnnnnnnnnnnnnnnnnnnnnnnnnnnnnnnnnnnnnnnnnnnnnnnnnnnnnnnnnnnnnnnnnnnnnnnnnnnnnnnnnnnnnnnnnnnnnnnnnnnnnnnnnnnnnnnnnnnnnnnnnnnnnnnnnnnnnnnnnnnnnnnnnnnnnnnnnnnnnnnnnnnnnnnnnnnnnnnnnnnnnnnnnnnnnnnnnnnnnnnnatatcaagtgtggaccgagctttcgagctgatcctacaaccggacgaaacttcgtcctaaatccgaactcctactgggcataaagtgtacccactatgaaacttcggaggccgtggcaggcggattattttggcccgccgagaccctcctgtcactccgtagtctctatcaatcttctgggcattaaagcgcggggatgtgaccgaccaatcagagccctcggtcagccatcaggcagttagacctgttgtcaagactgatgtgacgacgcctcgccaagcgaccgtgtgacgcgaacgcgtcatcagtgaggtcggcgcgaccttcactgtgttgtaccgcaatcattcaggtgattacgggacgatgattacgtcacggtgattacgccaagattgtgggtacaagatgggcatcgacgtggcgttctctgattggataaggtaactgtgtatccagtagagaatccagtagggtgtatccagtaagaggtatccagtagcaggcttagaggtagcacgcggttgcgaactaaggacctgaatcgaatcactttgcattttgccaactactgctcaagtgctcttccttttggttatgagcccaagccccgtcttccctgaccaagaccccgactacgccttcgccatggacgccgccccaaccgcgaccgcccgcatcaacaagttcgacggaaccaacttccacacatggaagttcaagatgcagatggtgctggaggagcgcgaactgtgggaagtgacgagtggggaagtgaagctcgagcagtgcacgaccgcggcggaccaagcgacgtttcgcaagaagtcgcgcaaggcgctggcgatcgtctgcctcgcgatggaggactcgcagctgccgctggtgcggtcggcgaaggacgcgcatgatgcatggtcaagactcgagggacacttcgagaagaagagcctggcgaacaagctctttcttcgtcgacggttcttcacgacaacgatggacgaaggtgatgatgtgctggagcacattaacaagctcaagacgctggcggaacagctcgacgcggtcggcgctccggtcagcgaggacgacttggtgatcacgcttcttgccagtctgagcgagtcgtaccagttcctcatcacggcgttggaatcgcgttccgacacgctgacgtgggagctcgtgacgtctcggctcctgcacgaggacatgaagcgcaaggaacaaggtggcggtgctgacggaaccgcgcacgctcaaggtcaagcgttcatgacaagcgacaacgggaagcgcaagggacggcaggcgcaagcgcagaggacgagcgcctgtcactactgcggcgagcacggacattggatcgccaagtgtccggtgcggatccgcgagaacggggagcggcagaggccgcaacgagcgaacgtcgcgcaggtcgaagatgactctggcgacttcctcttctcggttggtggcgacacgggtgcctccaagctgagcggcatgtggttggtcgactcgggtgcgacgcagcacatgacgtactcgaaggagtacatgaagaactacaagaagatctctccggtggacgtgcatctggcggacgacggcgtggttcaggcggtggggagcggcgacatcgtgatgtcgatgcagacaccgcgcggcatgaagaagggtgtgctcacgggtgtgtggcacatcccgaagctgtcgcgcaacctgttctccgtcggccgcttcaccaaggacgtcgggccagtgaccttcgagagcgacgggtgcttcgcggaaacgaagggtctcaagtggaagctcggcgctcgcgaaggcaaaggactgttcaagctctgcatgacgccgaggacgcctgctgacgaggccaatgcggcaagctcgaagaatcgccaaggggacaccacgtcgtacctctggcaccttcgacttggtcacatcggccatggtggtctcgacgccatcgtcaagaagggctacggcactggcatcccaatgacgtcggtgaagcagtgggaggtgtgcgacgggtgcgcactcggcaagcaaacgcgagtaagcttcatgaagtcgtcgccgaaccgtgcgaagcaatggtccacagcgatgtgtgcggtccgatgcagacggcgacgttcggaggcaagcgctacttcgtcacgttcatcgacgacaagtcgcacttctgcgtggtgtacctgctacggaacaagtcggaggtggctgccaagttcgctgcgttcgtcgcgttggctgagacgcagaccggcaagcgagtgaaggtgcttcggagcgacaacggcggcgagtacacttcgggtgcgatggccaagttgtgtgcggatcgcggcatcgagcagaagttcacgccaccatacacgcctcagctcaacggagtggccgagcgaatgaatcggacgctggtggagtgtgcgcgctgcatgctggagcacgccgggttgtcgaaggagtactggggagaagcggtgatgacggccacgttcctccgcaaccggtgtccgacgcgcgccatcagtcacgacaagtcgccgcaccacgtttggaccggcaagaagcctttgctggccaacctcaaggtgttcgggtgccacgcgtacgtgcacgtgccgaaggagaagcggtcgaagttcgacgctcggtcggtgcgctgtcgtttcctcgggtactcggagcacgagaaggcgtatcggttcgaggagatcgagagcggtctgttgtcaagactgatgtgacgacgccccgccaagcgaccgtgtgacgcgaacgcgtcatcagtgaggtcggcgtgaccttcactgtgcggtaccgaaatcattcaggtgattacgggacgatgattacgtcacggtgattacgccaagattgtgggtacaagatgggcatcgacgtggcgttctctgattggataaggtaactgtgtatccagtagagaatccagtagggtgtatccagtaagaggtatccagtagcaggcttagaggtagcacgcggttgcgaactaaggacctgaatcgaatcactttgcattttgccaactactgctcaagtgctcttccttttggttatgagcccaagccccgtcttccctgaccaagaccccgactacgccttcgccatggacgccgccccgaccgcgaccgcccgcatcaacaagttcgacggaaccaacttccacacatggaagttcaagatgcagatggtactggaggagcgcgaactgtgggaagtgacgagtggggaagtgaagctcgagcagtgcacgaccgcggcggaccaagcgacgtttcgcaagaagtcgcgcaaggcgctggcgatcgtctgtctcgcgatggaggactcgcagctgccgctggtgcggtcggcgaaggacgcgcatgatgcatggtcaagactcgagggacacttcgagaagaagagcctggcgaacaagctctttcttcgtcgacggttcttcacgacaacgatggacgaaggtgatgatgtgctggagcacattaacaagctcaagacgctggcggaacagctcgacgcggtcggcgctccggtcagcgaggacgacttggtgatcacgcttcttgccagtctgagcgagtcgtaccagttcctcatcacggcgttggaatcgcgttccgacacgctgacgtgggagctcgtgacgtctctgttgtcaagactgatgtgacgacgcctcgccaagcgaccgtgtgacgcgaacgcgtcatcagtgaggttggcgtgaccttcactgtgttgtaccgcaatcattcaggtgattacgggacgatgattacgtcacggtgattacgccatgattgtgggtacaggattgtgggtacaagatgggcatcgacgtggcgttctctgattggataaagtaactgtgtatccagtagagaatccagtagggtgtatccagtaagaggtatccagtagcaggcttagaggtagcacgcggttgcgaactaaggacctgaatcgaatcactttgcattttgccaactactgctcaagtgctcttccttttggttatgagcccaagccccgtcttcccnnnnnnnnnnnnnnnnnnnnnnnnnnnnnnnnnnnnnnnnnnnnnnnnnnnnnnnnnnnnnnnnnnnnnnnnnnnnnnnnnnnnnnnnnnnnnnnnnnnnnnnnnnnnnnnnnnnnnnnnnnnnnnnnnnnnnnnnnnnnnnnnnnnnnnnnnnnnnnnnnnnnnnnnnnnnnnnnnnnnnnnnnnnnnnnnnnnnnnnnnnnnnnnnnnnnnnnnnnnnnnnnnnnnnnnnnnnnnnnnnnnnnnnnnnnnnnnnnnnnnnnnnnnnnnnnnnnnnnnnnnnnnnnnnnnnnnnnnnnnnnnnnnnnnnnnnnnnnnnnnnnnnnnnnnnnnnnnnnnnnnnnnnnnnnnnnnnnnnnnnnnnnnnnnnnnnnnnnnnnnnnnnnnnnnnnnnnnnnnnnnnnnnnnnnnnnnnnnnnnnnnnnnnnnnnnnnnnnnnnnnnnnnnnnnnnnnnnnnnnnnnnnnnnnnnnnnnnnnnnnnnnnnnnnnnnnnnnnnnnnnnnnnnnnnnnnnnnnnnnnnnnnnnnnnnnnnnnnnnnnnnnnnnnnnnnnnnnnnnnnnnnnnnnnnnnnnnnnnnnnnnnnnnnnnnnnnnnnnnnnnnnnnnnnnnnnnnnnnnnnnnnnnnnnnnnnnnnnnnnnnnnnnnnnnnnnnnnnnnnnnnnnnnnnnnnnnnnnnnnnnnnnnnnnnnnnnnnnnnnnnnnnnnnnnnnnnnnnnnnnnnnnnnnnnnnnnnnnnnnnnnnnnnnnnnnnnnnnnnnnnnnnnnnnnnnnnnnnnnnnnnnnnnnnnnnnnnnnnnnnnnnnnnnnnnnnnnnnnnnnnnnnnnnnnnnnnnnnnnnnnnnnnnnnnnnnnnnnnnnnnnnnnnnnnnnnnnnnnnnnnnnnnnnnnnnnnnnnnnnnnnnnnnnnnnnnnnnnnnnnnnnnnnnnnnnnnnnnnnnnnnnnnnnnnnnnnnnnnnnnnnnnnnnnnnnnnnnnnnnnnnnnnnnnnnnnnnnnnnnnnnnnnnnnnnnnnnnnnnnnnnnnnnnnnnnnnnnnnnnnnnnnnnnnnnnnnnnnnnnnnnnnnnnnnnnnnnnnnnnnnnnnnnnnnnnnnnnnnnnnnnnnnnnnnnnnnnnnnnnnnnnnnnnnnnnnnnnnnnnnnnnnnnnnnnnnnnnnnnnnnnnnnnnnnnnnnnnnnnnnnnnnnnnnnnnnnnnnnnnnnnnnnnnnnnnnnnnnnnnnnnnnnnnnnnnnnnnnnnnnnnnnnnnnnnnnnnnnnnnnnnnnnnnnnnnnnnnnnnnnnnnnnnnnnnnnnnnnnnnnnnnnnnnnnnnnnnnnnnnnnnnnnnnnnnnnnnnnnnnnnnnnnnnnnnnnnnnnnnnnnnnnnnnnnnnnnnnnnnnnnnnnnnnnnnnnnnnnnnnnnnnnnnnnnnnnnnnnnnnnnnnnnnnnnnnnnnnnnnnnnnnnnnnnnnnnnnnnnnnnnnnnnnnnnnnnnnnnnnnnnnnnnnnnnnnnnnnnnnnnnnnnnnnnnnnnnnnnnnnnnnnnnnngccaccatacacgcctcagctcaacggagtggccgagcgaatgaatcggacgctggtggagtgtgcgcgctgcatgctggagcacgccgggttgtcgaaggagtactggggagaagcagtgatgacggccacgttcctccgcaaccggtgtccgacgcgcgccatcagtcacgacaagtcgccgtaccacgtttggaccggcaagaagcctttgctggccaacctcaaggtgttcgggtgccacgcgtacgtgcacgtgccgaaggagaagcggtcgaagttcgacgctcggtcggtgcgctgtcgtttcctcgggtactcggagcacgagaaggcgtatcggttcgaggagatcgagagcggtcgcgtgttggtgagccgcgacgcgcagttcatggaggatgtcttcgacggtgggagacgcgactacgcttcgaaggaggtgttggtgggtcttccgacagatgatgatgaagacaccacggatgaagagactcagtccggatcagacgagaacagagaagaagctgcgcggaatcaagactttgaacccggcagcaagcgacacccgcgcacgcagtcgctcgaggaagccgtggaggttccgagtgccaagcggtatgcggtgccgagacgacagcagccgctggacgagatgtctgccgcagcacaagagaaggaagacttcgaggctgcgtacgtcgtggattcagtgggagagatgccgacaacgttcaagtcggcgatggaatccagcgacgcagacaagtggaaagaggcgtgcgactcggaggtggagtcgctccgcaagaacgagacgtggaccctggtgccactgccgaagggacgcaaggcgatcggctgcagatgggtgttccgcgtgaaggagaaccagtctggagagatcgagcggttcaaggcgcgactggtggcgaaggggttctcgcagaagtacggcatcgactacgacgagacgttcgcgccggtggccaagttcacgtcgattcgggtgttgttgagtctggcggccaagtacaagctcacagtgcaccagatggatgtgaagaccgcgttcctcaacggcttgttggacgaggacatctacatggcgcagccggacggatatgtggacggagatcgacccgactacgtgtgccggctcaagcgttcgctgtacggcctgaagcaatcgccgcggatgtggaacaagacgatcgacgagttcatgttgaagctggggttcaagaagtgcgagtccgaccactgcatctacttgaagcgggacaatcacgacatgatgttcgtggcactgtacgtggacgatctggtcctcgccagcagcagcgacgggatgctgaaggacacgaagcaggcgctgagtgaccggttcgagatgactgacatgggccagctcaagtacttcctcggtatggagatcgagcaagatgtggcgactgggaaggtgtcggtgcggcagaccaagttcgcgaaggacattctcgagaagttcaagatggatgagagcaaccctgtgaagacaccgcaggatccgggtctgaagctgaccaaggccatgtgcgagggaggctgcaagcacgacgagaccatggcgaatgttccgtaccggaacgccgtgggctgccccatgtatctcatggtggggactcgtccggacctcgcagcggcagtgggagtgctgagccagttcgcagcggacccatgtccgacacactggcaggcgctcaagagggtcttccgctacatccgaggaaaaggaagagcacttgggcagtagttggcaaaatgcaaagtgattcgattcaggtccttagttcgcaaccgcgtgctacctctaagcctgctactggatacctcttactggatacaccctactggattctctactggatacacagttaccttatccaatcagagaacgccacgtcgatgcccatcttgtacccacaatcttggcgtaatcaccgtgacgtaatcatcgtcccgtaatcacctgaatgatttcggtaccacacagtgaaggtcacgccgacctcactgatgacgcgttcgcgtcacacggtcgcttggcgaggcgtcgtcacatcagtcttgacaacactcccactcgactcgtcagcgaccacgatgcccagcttcgtcctgagcgcgtcgaactgcggcgccgcgatcggcttcgtcatgatgtccgccagcatgtcgagtgtcgaaacatactgcaacaccacttgaccgtcttccaccttctcgcgcacgaagtggtagcgaatgtcgatgtgcttggtgcgcttgtggaactccgggttcttggccaacgcgatggagccttgggtgtcctcgtagatcttcaccccttcatcgctcgccatctcgcccagctcgcacagaaacaccttgagccacaccgcctcctgcgtggcctccgacagcgccatgtactcggcttccgtcgacgagagcgccaccgtgcgctgcttcttgcttcgccagctgatgcatccgccgttcatcatgaacgcgtagccgctcgtactccgtcgagactcgatgtcgccggcccagtccgcgtccgagtagccttgcagtccgtcctcgctgctcgcttgaaacacgaggccgtgcgtcttcgtgcctcggatgtagcggaagaccctgccagtgtgtcggacatgggtccgctgcgaactggctcagcactcccactgccgctgcgaggtccggacgagtccccaccatgagatacatgaggcagcccacggcgttccggtacggaacattcgccatggtctcgtcgtgcttgcagcctccctcgcacatggccttggtcagcttcagacccggatcctgcggtgtcttcacagggttgctctcatccatcttgaacttctcgagaatgtccttcgcggacttggtctgccgcaccgacaccttcccagtcgccacatcttgctcgatctccatactgagaaagtacttgagctggcccatgtcggtcatctcgaaccggtcactcagcgcctgcttcgtgtccttcagcatcccgtcgctgctgctggcgaggaccagatcgtccacgtacagtgccacgaacatcatgtcgtgattgtcccgcttcaagtagatgcagtggtcggactcgcacttcttgaaccccagcttcaacatgaactcgtcgatcgtcttgttccacatccgcggcgactgcttcaggccgtacagcgaacgcttgagccggcacacgtagtcgggtcgatctccgtccacatatccgtccggctgcgccatgtagatgtcctcgtccaacaagccgttgaggaacgcggtcttcacatccatctggtgcactgtgagcttgtacttggccgccagactcagcaacacccgaatcgacgtgaacttggccaccggcgcgaacgtctcgtcgtagtcgatgccgtacttctgcgagaaccccttcgccaccagtcgcgccttgaaccgctcgatctctccagactggttctccttcacgcggaacacccatctgcagccgatcgccttgcgtcccttcggcagtggcaccagggtccacgtctcgttcttgcggagcgactccacctccgagtcgcacgcctctttccacttgtctgcgtcgctggattccatcgccgacttgaacgttgtcggcatctctcccactgaatccacgacgtacgcagcctcgaagtcttccttctcttgtgctgcggcagacatctcgtccagcggttgctgtcgtcttggcaccgcataccgcttggcactcggaacctccacggcttcctcgagcgactgcgtgcgcgggtgtcgcttgctgccgggttcaaagtcttgattccgcgcagcttcttctctgttctcgtctgatccggactgagtctcttcatccgtggtgtcttcatcatcatctgtcggaagacccaccaacacctccttcgaagcgtagttgcgtctcccaccgtcgaagacatcctccatgaactgcgcgtcgcggctcaccaacacgcgaccgctctcgatctcctcgaaccgatacgccttctcgtgctccgagtacccgaggaaacgacagcgcaccgaccgagcgtcgaacttcgaccgcttctccttcggcacgtgcacgtacgcgtggcacccgaacaccttgaggttggccagcaaaggcttcttgccggtccaaacgtggtgcggcgacttgtcgtgactgatggcgcgcgtcggacaccggttgcggaggaacgtggccgtcatcactgcttctccccagtactccttcgacaacccggcgtgctccagcatgcagcgcgcacactccaccagcgtccgattcatccgctcggccactccgttgagctgaggcgtgtatggtggcgtgaacttctgctcgatgccgcgatccgcacacaacttggccatcgcacccgaagtgtactcgccgccgttgtcgctccgaagcaccttcactcgcttgccggtctgcgtctcagccaacgcgacgaacgcagcgaacttggcagccacctccgacttgttccgtagcaggtacaccacgcagaagtgcgacttgtcgtcgatgaacgtgacgaagtagcgcttgcctccgaacgtcgccgtctgcatcggaccgcacacatcgctgtggaccacctccagcacttgcttcgcacggttcggcgacgacttcatgaagcttactcgcgtttgcttgccgagtgcgcacccgtcgcacacctcccactgcttcaccgacgtcattgggatgccagtgccgtagcccttcttgacgatggcgtcgagaccaccatggccgatgtgaccaagtcgaaggtgccagaggtacgacgtggtgtccccttggcgattcttcgagcttgccgcattggcctcgtcagcaggcgtcctcggcgtcatgcagagcttgaacagtcctttgccttcgcgagcgccgagcttccacttgagacccttcgtttccgcaaagcacccgtcgctctcgaaggttactggcccgacgtccttggtgaagcggccgacggagaacaggttgcgcgacagcttcgggatgtgccacacacccgtgagcacacccttcttcatgccgcgcggtgtctgcatcgacatcacgatgtcgccgctccccaccgcctgaaccacgccgtcgtccgccagatgcacgtccaccggagagatcttcttgtagttcttcatgtactccttcgagtacgtcatgtgctgcgtcgcacccgagtcgaccagccacatgccgctcagcttggaggcacccgtgtcgccaccaaccgagaagaggaagtcgccagagtcatcttcgacctgcgcgacgttcgctcgttgcggcctctgccgctccccgttctcgcggatccgcaccggacacttggcgatccaatgtccgtgctcgccgcagtagtgacaggcgctcgtcctctgcgcttgcgcctgccgtcccttgcgcttcccgttgtcgcttgtcatgaacgcttgaccttgagcgtgcgcggttccgtcagcaccgccaccttgttccttgcgcttcatgtcctcgtgcaggagccgagacgtcacgagctcccacgtcagcgtgtcggagcgcgattccaacgccgtgatgaggaactggtacgactcgctcagactggcaagaagcgtgattaccaagtcgtcctcgctgaccggagcgccgaccgcgtcgagctgttccgccagcgtcttgagcttgttaatgtgctccagcacatcatcaccttcgtccatcgttgtcgtgaagaaccgtcgacgaagaaagagcttgttcgccaggctcttcttctcgaagtgtccctcgagtcttgaccatgcatcatgcgcgtccttcgccgaccgcaccagcggcagctgcgagtcctccaacgcgagacagacgatcgccagcgccttgcgcgacttcttgcgaaacgtcgcttggtccgccgcggtcgtgcactgctcgagcttcacttccccactcgtcacttcccacagttcgcgctcctccagcaccatctgcatcttgaacttccatgtgtggaagttggttccgtcgaacttgttgatgcgggcggtcgcggtcggggcggcgtccatggcgaaggcgcagtcggggtcttggtcagggaagacggggcttgggctcataaccaaaaggaagagcacttgagcagtagttggcaaaatgcaaagtgattcgattcaggtccttagttcgcaaccgcgtgctacctctaagcctgctactggatacctcttactggatacaccctactggattctctactggatacacagttaccttatccaatcagagaacgccacgtcgatgcccatcttgtacccacaatcttggcgtaatcaccgtgacgtaatcatcgtcccgtaatcacctgaatgatttcggtaccacacagtgaaggtcacgccgacctcactgatgacgcgttcgcgtcacacggtcgcttggcggggcgtcgtcacatcagtcttgacaacagatctcagcagcctatctctactgagcgcgccggctggaacagctcaaaacaacaaggctctcatccttggagcttctggataaattggaacgatctccagcttgacggcaacaagcattacaggtactctacagaccgcggctcagcctaatatcacttctgtcggaactctaagttcgttgagtataatttctgtttttggcaaaggattggtcattcagaatgatagtactacatcgacagccagtctcaatatcgtgagctagtatcagatggagcaaggcatacgaggatcggctaatgccatcttgcccaatacttacttttggtgtnnnnnnnnnnnnnnnnnnnnnnnnnnnnnnnnnnnnnnnnnnnnnnnnnnnnnnnnnnnnnnnnnnnnnnnnnnnnnnnnnnnnnnnnnnnnnnnnnnnnnnnnnnnnnnnnnnnnnnnnnnnnnnnnnnnnnnnnnnnnnnnnnnnnnnnnnnnnnnnnnnnnnnnnnnnnnnnnnnnnnnnnnnnnnnnnnngcgagaacgtctcggtgtagtcaatgccgtacttctgcttgaagcccttggccacgaggcgcgccttgtacttctcgatcgagccgtccgctttgcgcttgatcttgaacgcccacttggtatcgatggcgcgttgtccgttaggcaacttggcagctcgaaacacaccacgcagtcgcatcgacttgagctccgcgcggatcgctttgcgccagtgcaattgatcaggaccgttcacagcctcttggaacgtcgtcggctccgatagatcggctgctgcttccacagcgttggcactggcacgccaaaacactggaggcgtcgagtcgtcgtcttcatcttggtccccagacttttcttcttcgtcggggtcggctcggcgcgaggaggatacgtccggcgcacttgcttcttctaagccagctcggtggcgaacggggcgcgatcttctggcagtgttgtcgtcgccactcggtcggtacttgcgcttccccgcctgcttgaagctcgtttggcgcggtccatcgttgtcgtccaggtccagcgcgtccaagtccagcacagcatcatcgacgtcttcatccgaagtatgcgtcgaaagtccaaaggtcgactcatcgaagttgacatcgcgactgataaccacctgccccgcctcgatgtcataaactcgatacgccttggacacttcttcgtagctgaggaacagcccggcgcgatccttggtgtcccacttgcgccgtctttccttcggcgtcaggatgtacgtctggcattcaaacacacgcatgtgcttcacactcggcttggacttgtaaacgatctcgaacggagtcttgtgttcgatcttgggtgatggcagacgattcttcacgtagatggctgtcatggccgcctcagcccagaagctcttgtccagcttggcgtgatgcagcatgctgcggccaatcgtgacgatggtccggatggcgcgttctgccgtgccgttggtctggtgcgcgtacggaaccgtggtttgctgctcgatgccttcgacttcgtagaagtccttgagcgagttggtcgcgaactcacgggctccgtcgtgccgcacaaacttgaccttcttgccgaactgcgtctgcaccttcgtgacgtacatcttgatgcagtcctcgctctccgacttggcacgcaggcagaaccccttcatgcatccgctggcttcgtccacgatcagcagcagatacttgctgccacccagtgactcttcttccatggggccgcacacgtcgaagtggagcagctcgaacgtgtcgtagtgacgcttgtcacggttgcttgggaacggcttctggaccattttcccttgctggcagccgcgacacacgcttggtccactcgacttggaaggtgccttcgcgtccttgatcatgttgttgtcgaccatcttgcgaagcacctccaccggagcgtgacccatacgcgcgtgtaagtcgaccgtcttcccactggtcgccgcattcgccgatcgctgaggcgtctggagccagtagagtccatccacgaggtttgccgtcgccaccacttgcttggagcccttgtgcgcaatctgcatcttggtgctgtcgaacacgacttggaacagaccactcttgttgatctgtggcaccgaaagcagattcttgctcatgcttgggacgtacagcgcgttcttgatctcgatgtcgcgctcgtcgccgttgggcagaaccactcgttccacgatggtccccacacccatgatggccgccttgttgccgtcggccaccgaaagttcgccttcattccgctcaatcaaatgagcgaacttggccttgtcgttgcagatgtggtgcgttgcgccgctgtcgaccgcccacaacccggacacattcttgcccgtcgaaatgccacactccagtgagaccgcgaacgccactcgatcatagccgtagtcgtagttgtagctggcgtcgtcgttcctcccctgggcattgctggccccgcgtccacggccattgccattgccgccgcgtccacggccattgccattgccgccgcgtcttgggccccgattctcgtccttctgcttggtccagcacttgtcaatcgtgtgccccaatttcccgcagttcgtacaatggcgagactctcggtcggtgttgaacgccttggccgcattctccgtcttcaccgtcgccgtcttctcgccttgtctcttgatgtgctcattcgtcagcaccttcatgacgtcttgcgatcgtagttcagcgctgctcatctccaagttcagcacgacgttctcgtagctcttggggaggctgcgcaacaggcagatcgccacgtcctcatcctccatcttggcgccgatgctgctgagcttggcgctgatgttgaggacctcgttgcaatgatgcaagacgttgccgccttccgacatctccatgctgaagagttggcgcttcaggtagatgcgtccagccttctgcgaaccaccgtacagcgtcttcaggcgcgtccacgcaacccacgcttcctcgcagtcgtcgagtagtccgcgtccatgtggagcaacatcagtccgaacgcgatgttgctcgacttgacgtagtcgtccttggcccgcgagtccgtgaagctcggcgtcgtctcgcggttcacgacatgccacgtcgacttggtcaggaacacgccacgcatgtagcggttccacgtcgcgtagttgtccccgttgaacttgtcaatggagaccttggtcgaggcgtcttgggcagaggacatggtgcttgggctcataacctgatggaaggtatggatcttggacacgaagctcggacgaagcggagggagggacgtcgcagacggcgggaccggagcgaaggcacttgaggggtagaatgaagattcgaaagtgattgaattgttggagcttacaccctactgttatagacacgcgaccctgcgtcctatcacctagtgcatctaatcaaccatcactcaccggtgttcatccaatcatcctactcgtctaatcatcggtggcgtaaacaacttaccgtaatcaccataatcaacgtgggttcggattggaccggttcgggttaaccggttaatgggtacaactggtacacagtacccaagaccagcaaccctcaataacacctacatgaaacctataaagaccatactggctgtgcggtcgtgtcaatcgagttcgattgactttctgcgctggacatactcattcgtggacgacaagtattttcacaaacttatggctacgtgcgcgaccaagagaaacaactctgccgcaatgacttggctggatcgagctgcgcgtcgcaattccaagccacccaaaaggcgccctcgtctggttaaacgagacacatctcagccacaaaaaatgattcgattggatatctagtaattaaaaaatagttctttgaatgtgattgccttgtccgaaacaaacttaattaaaccatttgtagtgacagaaggaacaggtgatgacagccgtctctccttcatccgttgacctcatttcgtatttaaccgagaacaggtgagctcctcgtttgcaccgccaattctgctacgcttcgcttcgctcatggcgggcaaggcgtcggtaaaaagatagtaactacttcgcagtgcaactactccggcctacgcgccgaccattgcagacctccgctacgctccggttgcaaaaaaacggtctctctaatgcctcatatgacatatgctacgttggagtttcgcaccagtcgaaagaagtcttacttccacagacaaactacatcatcattgccactgcgatataattcagataaaatcacattatcatcaaacttaatgttatgagccacgatgctatttactttgtggtgaagcaccgaacgagaatttccaactgcgatgaaaaaggaagaacacttgagcagtagttggcaaaatgcaaagtgattcgattcaggtccttagttcgcaaccgcgtgctacctctaagcctgctactggatacctcttactggatacaccctactggattctctactggatacacagttaccttatccaatcagagaacgccacgtcgatgcccatcttgtacccacaatcttggcgtaatcaccgtgacgtaatcatcgtcccgtaatcacctgaatgattgcggtacaacacagtgaaggtcacgccgatctcactgatgacgcgttcgcgtcacacggtcgcttggcgaggcgtcgtcacatcagtcttgacaacaggcaaggcgtcggtaaaaagatagtaactacttcgcagtgcaactactccggcctacgcgccgatcattgcagacctccgctacgctccggttgcaaacggtctctctaatgcctcatatgacatatgctacgttggagtttcgcaccagtcgaaagaagtcttacttccacagacaaactacatcatcattgccactgcgatataattcagataaaatcacattatcatcaaacttaatgttatgagccacgatgctatttactttgtggtgaagcaccgaacgagaatttccaactgcgatgacatcaagcgacatggtgacagaacgataggcagggatcaggctgcagtcgcggatcaagagggtctatcgagagatctcaagcgattggataacgtcgacgcgtaaggcaacacatatgtcaagacagattacgggcgatcgcgcttggactgcggcgtgattcgacgtagacccaagcccggatcgacgaccaatctcgcagatctagggcggccgaggacagaagaggacggatcggcagcgcacggcaactcgcacaggtcatcgatcgggagttgatcgccgatcggaatcgatcgtggatcaggaggcgatcgtggatcgccgattggggtcgatcgtggatcgggagccgatcgtggatcgccgatcgaccnnnnnnnnnnnnnnnnnnnnnnnnnnnnnnnnnnnnnnnnnnnnnnnnnnnnnnnnnnnnnnnnnnnnnnnnnnnnnnnnnnnnnnnnnnnnnnnnnnnnnnnnnnnnnnnnnnnnnnnnnnnnnnnnnnnnnnnnnnnnnnnnnnnnnnnnnnnnnnnnnnnnnnnnnnnnnnnnnnnnnnnnnnnnnnnnnnnnnnnnnnnnnnnnnnnnnnnnnnnnnnnnnnnnnnnnnnnnnnnnnnnnnnnnnnnnnnnnnnnnnnnnnnnnnnnnnnnnnnnnnnnnnnnnnnnnnnnnnnnnnnnnnnnnnnnnnnnnnnnnnnnnnnnnnnnnnnnnnnnnnnnnnnnnnnnnnnnnnnnnnnnnnnnnnnnnnnnnnnnnnnnnnnnnnnnnnnnnnnnnnnnnnnnnnnnnnnnnnnnnnnnnnnnnnnnnnnnnnnnnnnnnnnnnnnnnnnnnnnnnnnnnnnnnnnnnnnnnnnnnnnnnnnnnnnnnnnnnnnnnnnnnnnnnnnnnnnnnnnnnnnnnnnnnnnnnnnnnnnnnnnnnnnnnnnnnnnnnnnnnnnnnnnnnnnnnnnnnnnnnnnnnnnnnnnnnnnnnnnnnnnnnnnnnnnnnnnnnnnnnnnnnnnnnnnnnnnnnnnnnnnnnnnnnnnnnnnnnnnnnnnnnnnnnnnnnnnnnnnnnnnnnnnnnnnnnnnnnnnnnnnnnnnnnnnnnnnnnnnnnnnnnnnnnnnnnnnnnnnnnnnnnnnnnnnnnnnnnnnnnnnnnnnnnnnnnnnnnnnnnnnnnnnnnnnnnnnnnnnnnnnnnnnnnnnnnnnnnnnnnnnnnnnnnnnnnnnnnnnnnnnnnnnnnnnnnnnnnnnnnnnnnnnnnnnnnnnnnnnnnnnnnnnnnnnnnnnnnnnnnnnnnnnnnnnnnnnnnnnnnnnnnnnnnnnnnnnnnnnnnnnnnnnnnnnnnnnnnnnnnnnnnnnnnnnnnnnnnnnnnnnnnnnnnnnnnnnnnnnnnnnnnnnnnnnnnnnnnnnnnnnnnnnnnnnnnnnnnnnnnnnnnnnnnnnnnnnnnnnnnnnnnnnnnnnnnnnnnnnnnnnnnnnnnnnnnnnnnnnnnnnnnnnnnnnnnnnnnnnnnnnnnnnnnnnnnnnnnnnnnnnnnnnnnnnnnnnnnnnnnnnnnnnnnnnnnnnnnnnnnnnnnnnnnnnnnnnnnnnnnnnnnnnnnnnnnnnnnnnnnnnnnnnnnnnnnnnnnnnnnnnnnnnnnnnnnnnnnnnnnnnnnnnnnnnnnnnnnnnnnnnnnnnnnnnnnnnnnnnnnnnnnnnnnnnnnnnnnnnnnnnnnnnnnnnnnnnnnnnnnnnnnnnnnnnnnnnnnnnnnnnnnnnnnnnnnnnnnnnnnnnnnnnnnnnnnnnnnnnnnnnnnnnnnnnnnnnnnnnnnnnnnnnnnnnnnnnnnnnnnnnnnnnnnnnnnnnnnnnnnnnnnnnnnnnnnnnnnnnnnnnnnnnnnnnnnnnnnnnnnnnnnnnnnnnnnnnnnnnnnnnnnnnnnnnnnnnnnnnnnnnnnnnnnnnnnnnnnnnnnnnnnnnnnnnnnnnnnnnnnnnnnnnnnnnnnnnnnnnnnnnnnnnnnnnnnnnnnnnnnnnnnnnnnnnnnnnnnnnnnnnnnnnnnnnnnnnnnnnnnnnnnnnnnnnnnnnnnnnnnnnnnnnnnnnnnnnnnnnnnnnnnnnnnnnnnnnnnnnnnnnnnnnnnnnnnnnnnnnnnnnnnnnnnnnnnnnnnnnnnnnnnnnnnnnnnnnnnnnnnnnnnnnnnnnnnnnnnnnnnnnnnnnnnnnnnnnnnnnnnnnnnnnnnnnnnnnnnnnnnnnnnnnnnnnnnnnnnnnnnnnnnnnnnnnnnnnnnnnnnnnnnnnnnnnnnnnnnnnnnnnnnnnnnnnnnnnnnnnnnnnnnnnnnnnnnnnnnnnnnnnnnnnnnnnnnnnnnnnnnnnnnnnnnnnnnnnnnnnnnnnnnnnnnnnnnnnnnnnnnnnnnnnnnnnnnnnnnnnnnnnnnnnnnnnnnnnnnnnnnnnnnnnnnnnnnnnnnnnnnnnnnnnnnnnnnnnnnnnnnnnnnnnnnnnnnnnnnnnnnnnnnnnnnnnnnnnnnnnnnnnnnnnnnnnnnnnnnnnnnnnnnnnnnnnnnnnnnnnnnnnnnnnnnnnnnnnnnnnnnnnnnnnnnnnnnnnnnnnnnnnnnnnnnnnnnnnnnnnnnnnnnnnnnnnnnnnnnnnnnnnnnnnnnnnnnnnnnnnnnnnnnnnnnnnnnnnnnnnnnnnnnnnnnnnnnnnnnnnnnnnnnnnnnnnnnnnnnnnnnnnnnnnnnnnnnnnnnnnnnnnnnnnnnnnnnnnnnnnnnnnnnnnnnnnnnnnnnnnnnnnnnnnnnnnnnnnnnnnnnnnnnnnnnnnnnnnnnnnnnnnnnnnnnnnnnnnnnnnnnnnnnnnnnnnnnnnnnnnnnnnnnnnnnnnnnnnnnnnnnnnnnnnnnnnnnnnnnnnnnnnnnnnnnnnnnnnnnnnnnnnnnnnnnnnnnnnnnnnnnnnnnnnnnnnnnnnnnnnnnnnnnnnnnnnnnnnnnnnnnnnnnnnnnnnnnnnnnnnnnnnnnnnnnnnnnnnnnnnnnnnnnnnnnnnnnnnnnnnnnnnnnnnnnnnnnnnnnnnnnnnnnnnnnnnnnnnnnnnnnnnnnnnnnnnnnnnnnnnnnnnnnnnnnnnnnnnnnnnnnnnnnnnnnnnnnnnnnnnnnnnnnnnnnnnnnnnnnnnnnnnnnnnnnnnnnnnnnnnnnnnnnnnnnnnnnnnnnnnnnnnnnnnnnnnnnnnnnnnnnnnnnnnnnnnnnnnnnnnnnnnnnnnnnnnnnnnnnnnnnnnnnnnnnnnnnnnnnnnnnnnnnnnnnnnnnnnnnnnnnnnnnnnnnnnnnnnnnnnnnnnnnnnnnnnnnnnnnnnnnnnnnnnnnnnnnnnnnnnnnnnnnnnnnnnnnnnnnnnnnnnnnnnnnnnnnnnnnnnnnnnnnnnnnnnnnnnnnnnnnnnnnnnnnnnnnnnnnnnnnnnnnnnnnnnnnnnnnnnnnnnnnnnnnnnnnnnnnnnnnnnnnnnnnnnnnnnnnnnnnnnnnnnnnnnnnnngcgaccgtgtgacgcgaacgcgtcatcagtgaggtcggcgtgaccttcactgtgtggtaccgaaatcattcaggtgattacgggacgatgattacgtcacggtgattacgccaagattgtgggtacaagatgggcatcgacgtggcgttctctgattggataaggtaactgtgtatccagtagagaatccagtagggtgtatccagtaagaggtatccagtagcaggcttagaggtagcacgcggttgcgaactaaggacctgaatcgaatcactttgcattttgccaactactgctcaagtgctcttccttttgagtggaacgcgcaacgagacttcggtgcgctccggaagctcattctcgaccccaacgacggatcggatggagtcgattgacgagcgttcggtgagctacgacacggcgattgattccttggacgccaaagaagatgacgaagatgatgactgggatgtccggacagcgatgtccgagagttcggaagctgcggttgtgtcggcaggtcgcagtggaggatcaaggtcgattacccgcgacctctccgacacgttcaaggacatgccgggccccgagcccgcctacgacgcggatgacggcgccaccgagggcttcaaaccctcggtgacggtaggaggggcaacctccaagccggttggcactcgtcctcccctcaacggggatactccggcggccaacaaggtcctaggccggtgcctagacctgatgaagaccaagagcgaatggatgcagttgttctccccgaagcaagtccgccaggccatctggatggacctcggaggggcgttggctacgccgatcaactcaacgagcactcggcacgttgcgcagaatactgtggacctcctgcgagctatggggtgcgaaccccagatcctccccacggaggctgcgctcgcgagttggacgccgaccgccgctgccacggcgttaaccaagtggaggaagaagctgcgtaatgcatttggagtggcggacgtcagttcgcgaggcccaacgatgcttcgttcgacctcggaggcagtagacccgtcgaaggtcccgctaccagcgacccctcggaagggagccactgatgacggtgtctttccaaccaagggcgaagcctcgccgtacatgcaagactcgcacatggtaactccacgatccacggaccgtagtgaacgtctggctagggagaacgaggcttcattcgccacgcctggcacgcgcggagcgaccgctcgtcggtccggccgacgttaccacctccaagatgattcgtcggacagcgacgacgacctcgggcccggctactacgaagggggcctaccgagcgaatgggcacgtcaggtgcgcgagctaagcgcgaccgacaaccagagctcaaccccaaagctcgagatcgccacgcatttgcctctcgccaacatcaagccgttctgcggaacgcgctgttgtcaagactgatgtgacgacgcctcgccaagcgaccgtgtgacgcgaacgcgtcatcagtgaggtcggcgtgaccttcactgtgtggtaccgaaatcattcaggtgattacgggacgatgattacgtcacggtgattacgccaagattgtgggtacaagatgggcatcgacgtggcgttctctgattggataaggtaactgtgtatccagtagagaatccagtagggtgtatccagtaagaggtatccagtagcaggcttagaggtagcacgcggttgcgaactaaggacctgaatcgaatcactttgcattttgccaactactgctcaagtgttcttccttttggttatgagcccaagccccgtcttccctgaccaagaccccgactacgccttcgccatggacgccgccccgaccgcgaccgcccgcatcaacaagttcgacggaaccaacttccacacatggaagttcaagatgcagatggtgctggaggagcgcgaactgtgggaagtgacgagtggggaagtgaagctcgagcagtgcacgaccgcggcggaccaagcgacgtttcgcaagaagtcgcgcaaggcgctggcgatcgtctgtctcgcgttggaggactcgcagctgccgctggtgcggtcggcgaaggacgcgcatgatgcatggtcaagactcgagggacacttcgagaagaagagcctggcgaacaagctctttcttcgtcgacgattcttcacgacaacgatggacgaaggtgatgatgtgctggagcacattaacaagctcaagacgctggcggaacagctcgacgcggtcggcgctccggtcagcgaggacgacttggtaatcacgcttcttgccagtctgagcgagtcgtaccagttcctcatcacggcgttggaatcgcgttccgacacgctgacgtgggagctcgtgacgtctcggctcctgcacgaggacatgaagcgcaaggaacaaggtggcggtgctgacgggaccgcgcacgctcaaggtcaagcgttcatgacaagcgacaacgggaagcgcaagggacggcaggcgcaagcgcagaggacgagcgcctgtcactactgcggcgagcacggacattggatcgccaagtgtccggtgcggatccgcgagaacggggagcggcagaggccgcaacgagcgaacgtcgcgcaggtcaaagatgactctggcgacttcctcttctcggttggtggcgacacgggtgcctccaagctgagcggcatgtggctggtcgactcaggtgcgacgcagcacatgacgtactcgaaggagtacatgaagaactacaagaagatctctccggtggacgtgcatctggcggacgacggcgtggttcaggcggtggggagcggcgacatcgtgatgtcgatgcagacaccgcgcggcatgaagaagggtgtgctcacgggtgtgtggcacatcccgaagctgtcgcgcaacctgttctccgtcggccgcttcaccaaggacgtcgggccagtgaccttcgagagcgacgggtgcttcgcggaaacgaagggtctcaagtggaagcttggcgctcgcgaaggcaaaggactgttcaagctctgcatgacgccgaggacgcctgctgacgaggccaatgcggcaagctcgaagaatcgccaaggggacaccacgtcgtgcctctggcaccttcgacttggtcacatcggccatggtggtctcgacgccatcgtcaagaagggctacggcactggcatcccaatgacgtcggtgaagcagtgggaggtgtgcgacgggtgcgcactcggcaagcaaacgcgagtaagcttcatgaagtcgtcgccgaaccgtgcgaagcaagtgctggaggtggtccacagcgatgtgtgcggtccgatgcagacggcgacgttcggaggcaagcgctacttcgtcacgttcatcgacgacaagtcgcacttctgcgtggtgtacctgctacggaacaagtcggaggtggctgccaagttcgctgcgttcgtcgcgttggctgagacgcagaccggcaagcgagtgaagatgcttcggagcgacaacggcggcgagtacacttcgggtgcgatggccaagttgtgtgcggatcgcggcatcgagcagaagttcacgccgccatacacgcctcagctcaacggagtggccgagcgaatgaatcggacgctggtggagtgtgcgcgctgcatgctggagcacgccgggttgtcgaaggagtactggggagaagcggtgatgacggccacgttcctccgcaaccggtgtccgacgcgcgccatcagtcacgacaagtcgccgcaccacgtttggaccggcaagaagcctttgctggccaacctcaaggtgttcgggtgccacgcgtacgtgcacgtgccgaaggagaagcggtcgaagtttgacgctcggtcggtgcgctgtcgtttcctcgggtactcggagcacgagaaggcgtatcggttcgaggagatcgagagcggtcgcgtgttggtgagccgcgacgcgcagttcatggaggatgtcttcgacggtgggagacgcgactacgcttcgaaggaggtgttggtgggtcttccgacagatgatgatgaagacaccacggatgaagagactcagtccggatcagacgagaacagagaagaagctgcgcggaatcaagactttgaacccggcagcaagcgacacccgcgcacgcagtcgctcgaggaagtcgtggaggttccgagtgccaagcggtatgcggtgccgagacgacagcagccgctggacgagatgtctgccgcagcacaagagaaggaagacttcgaggctgcgtacgtcgtggattcagtgggagagatgccgacaacattcaagtcggcgatggaatccagcgacgcagacaagtggaaagaggcgtgcgactcggaggtggagtcgctccgcaagaacgagacgtggatcctggtgccactgccgaagggacgcaaggcgatcggctgcagatgggtgttccgcgtgaaggagaaccagtctggagagatcgagcggttcaaggcgcgactggtggcgaaggggttctcgcagaagtacggcatcaactacgacgagacgttcgcgccggtggccaagttcacgtcgattcgggtgttgttgagtctggcggccaagtacaagctcacagtgcaccagatggatgtgaagaccgcgttcctcaacggcttgttggacgaggacatctacatggcgcagccggacggatatgtggacggagatcgacccgactacgtgtgccggctcaagcgttcgctgtacggcctgaagcaatcgccgcggatgtggaacaagacgatcgacgagttcatgttgaagctggggttcaagaagtgcgagtccgaccactgcatctacttgaagcgggacaatcacgacatgatgttcgtggcactgtacgtggacgatctggtcctcgccagcagcagcgacgggatgctgaaggacacgaagcaggcgctgagtgaccggttcgagatgaccgacatgggccagctcaagtactttctcggtatggagatcgagcaagatgtggcgactgggaaggtgtcggtgcggcagaccaagttcgcgaaggacattctcgagaagttcaagatggatgagagcaaccctgtgaagacaccgcaggatccgggtctgaagctgaccaaggccatgtgcgagggaggctgcaagcacgacgagaccatggcgaatgttccgtaccggaacgccgtgggctgcctcatgtatctcatggtggggactcgtccggacctcgcagcggcagtgggagtgctgagccagttcgcagcggacccatgtccgacacactggcaggcgctcaagagggtcttccgctacatccgaggcacgaagacgcacggcctcgtgtttcaagcgagcagcgaggacggactgcaaggctactcggacgcggactgggccggcgacatcgagtctcgacggagtacgagcggctacgcgttcatgatgaacggcggatgcatcagctggcgaagcaagaagcagcgcacggtggcgctctcgtcgacggaagccgagtacatggcgctgtcggaggccacgcaggaggcggtgtggctcaaggtgtttctgtgcgagctgggcgagatggcgagcgatgaagcggtgaagatctacgaggacaaccaaggctccatcgcgttggccaagaacccggagttccacaagcgcaccaagcacatcgacattcgctaccacttcgtgcgcgagaaggtggaagacggtcaagtggtgttgcagtatgtttcgacactcgacatgctggcggacatcatgacgaagccgatcgcggcgccgcagttcgacgcgctcaggacgaagctgggcatcgtggtcgctgacgagtcgagtgggagtgttgtcaagactgatgtgacgacgcctcgccaagcgaccgtgtgacgcgaacgcgtcatcagtgaggttggcgtgaccttcactgtgttgtaccgcaatcattcaggtgattacgggacgatgattacgtcacggtgattacgccatgattgtgggtacaggattgtgggtacaagatgggcatcgacgtggcgttctctgattggataaggtaactgtgtatccagtagagaatccagtagggtgtatccagtaagaggtatccagtagcaggcttagaggtagcacgcggttgcgaactaaggacctgaatcgaatcactttgcattttgccaactactgctcaagtgctcttccttttcggcattgactacaccgagaccttctcgcccgtggtcaagtatgtgacgctgcgcatggtgatcgcaattgctaagtattttggctggcccctcgaccaactcgacgtggtgacagcattcctgtacgggataatgaaggaggtggtcttctgcgtggttccggaaggcgtcgaactggatggtgacttcgactgcctggaactggtgaaggccatctacggtctcaagcaagcttcgcgagtgtggaacgagaccttcgacgagttcgtgtgctccatcggcttccaagtgtcggccttcgatccgtgcctctacatcaaggtggtggacggtcactgcgtgcttgtactggtgtacgtggatgacgtactgactaccgggagttcgcccgagctgatcgcacgcacgaagaccgacctgaagacgcgcttcgagatgaccgacagcggcaagtgcgcgtttgttcttgggatcgagttggtggatggcccggacggaagcgtgaccatgtgccagcggcgatacgtggacgacatcctgaagcgcttcgccatggacgagtgcaaggccgtggtgagtccggtggacatgagcactcgactggttccaagcgacgcggcgaccaaggtgaacgctccgtttcgcgaagctgttggtgctctgatgcacctgatgaccgccacgcgcccagacatcgcgtacgccgttggctatgtatcgcgcttcatggagaacccccaagaggaacactgggttgcggtcaagcgtatctttcgctacctgcaaggcaccaagacgcatgggatctgcttcaagccgggcgacaagatcgactttcgtggctactcggacgcggactgggccgacgacctcgccgaccgcaaatccacttcaggctacacgttcatgctcatgagtgcgcctgtgagctggggaagcaagaagcaatgaagcggagtacatcgcgctcagtctggctatccaagaaggtaagtggatttatcgcctgctatgcgagattctggcggccgctaatgagactggacccgaactcatgatccgcgaagacaaccagtcgtgcatcaagatgacgaagaacccagtgaaccacggtcgcgccaagcacatcgacatcaagtaccaccacatccgcgatgaagtcaagcgcggcgaagtcaagctccagtactgcgagacttctgtgatgctagcggacatcatgacgaaggcgcttgagggaccacgccacacggatctgacggtggctctcggcattcgtgggacttcgcattgagggggcgtattgagggttgctggtcttgggtactgtgtaccagttgtacccattaaccggttaacccgaaccggtccaatccgaacccacgttgattatggtgattacggtaagttgtttacgccaccgatgattagacgagtaggatgattggatgaacaccggtgagtgatggttgattagatgcactaggtgataggacgcagggtcgcgtgtctataacagtagggtgtaagctccaacaattcaatcactttcgaatcttcattctatccctcaagtgccttcgctccggtcccgccgtctgcgacgtccctccctccgcttcgtccgagcttcgtgtccaagatccataccttccatcaggttatgagcccaagcaccatgtcctctgcccaagacgcctcgaccaaggtctccattgacaagttcaacggggacaactacgcgacgtggaaccgctacatgcgtggcgtgttcgtgaccaagtcgacgtggcatgtcgtgaaccgcgagacgacgccgagcttcacggactcgcgggccaaggacgactacgtcaagtcgagcaacatcgcgttcggactgatgttgctccacatggacgcggactaccaccatgtggtcgacgactgcgaggaagcgtgggttgcgtggacgcgcctgaagacgctgtacggtggttcgcagaaggctggacgcatctacctgaagcgccaactcttcagcatggagatgtcggaaggcggcaacgtcttgcatcattgcaacgagnnnnnnnnnnnnnnnnnnnnnnnnnnnnnnnnnnnnnnnnnnnnnnnnnnnnnnnnnnnnnnnnnnnnnnnnnnnnnnnnnnnnnnnnnnnnnnnnnnnnnnnnnnnnnnnnnnnnnnnnnnnnnnnnnnnnnnnnnnnnnnnnnnnnnnnnnnnnnnnnnnnnnnnnnnnnnnnnnnnnnnnnnnnnnnnnnnnnnnnnnnnnnnnnnnnnnnnnnnnnnnnnnnnnnnnnnnnnnnnnnnnnnnnnnnnnnnnnnnnnnnnnnnnnnnnnnnnnnnnnnnnnnnnnnnnnnnnnnnnnnnnnnnnnnnnnnnnnnnnnnnnnnnnnnnnnnnnnnnnnnnnnnnnnnnnnnnnnnnnnnnnnnnnnnnnnnnnnnnnnnnnnnnnnnnnnnnnnnnnnnnnnnnnnnnnnnnnnnnnnnnnnnnnnnnnnnnnnnnnnnnnnnnnnnnnnnnnnnnnnnnnnnnnnnnnnnnnnnnnnnnnnnnnnnnnnnnnnnnnnnnnnnnnnnnnnnnnnnnnnnnnnnnnnnnnnnnnnnnnnnnnnnnnnnnnnnnnnnnnnnnnnnnnnnnnnnnnnnnnnnnnnnnnnnnnnnnnnnnnnnnnnnnnnnnnnnnnnnnnnnnnnnnnnnnnnnnnnnnnnnnnnnnnnnnnnnnnnnnnnnnnnnnnnnnnnnnnnnnnnnnnnnnnnnnnnnnnnnnnnnnnnnnnnnnnnnnnnnnnnnnnnnnnnnnnnnnnnnnnnnnnnnnnnnnnnnnnnnnnnnnnnnnnnnnnnnnnnnnnnnnnnnnnnnnnnnnnnnnnnnnnnnnnnnnnnnnnnnnnnnnnnnnnnnnnnnnnnnnnnnnnnnnnnnnnnnnnnnnnnnnnnnnnnnnnnnnnnnnnnnnnnnnnnnnnnnnnnnnnnnnnnnnnnnnnnnnnnnnnnnnnnnnnnnnnnnnnnnnnnnnnnnnnnnnnnnnnnnnnnnnnnnnnnnnnnnnnnnnnnnnnnnnnnnnnnnnnnnnnnnnnnnnnnnnnnnnnnnnnnnnnnnnnnnnnnnnnnnnnnnnnnnnnnnnnnnnnngccaagcacatcgacatcaagtaccaccacatccgcgatgaagtcaagcgcggcgaagtcaagctccagtactgcgagacttctgtgatgctagcggacatcatgacgaaggcgcttgcgggaccacgccacacggatctgacggtggctctcggcattcgtgggacttcgcattgagggggcgtattgagggttgctggtcttgggtactgtgtaccagttgtacccattaaccggttaacccgaaccggtccaatccgaacccacgttgattatggtgattacggtaagttgtttacgccaccgatgattagacgagtaggatgattggatgaacaccggtgagtgatggttgattagatgcactaggtgataggacgcagggtcgcgtgtctataacagtagggtgtaagctccaacaattcaatcactttcgaatcttcattctacccctcaagtgccttcgctccggtcccgccgtctgcgacgtccctccctccgcttcgtccgagcttcgtgtccaagatccataccttccatcactctcatggtaacatcttggccgaacgaccgctgcagattgtctcgatggtcccgagctacgctgagctatcggccacaagccaacggccagcaggaacgctcggttaagaccgtgatacaatccgtccgagtgtacgctgaagatccgctacaacaagactgggacgagatcgtggagaagctaatcttcgctatcaacaactcgcaggacgccacgcgcaaggacacgccgttttgcctcgtacnnnnnnnnnnnnnnnnnnnnnnnnnnnnnnnnnnnnnnnnnnnnnnnnnnnnnnnnnnnnnnnnnnnnnnnnnnnnnnnnnnnnnnnnnnnnnnnnnnnnnnnnnnnnnnnnnnnnnnnnnnnnnnnnnnnnnnnnnnnnnnnnnnnnnnnnnnnnnnnnnnnnnnnnnnnnnnnnnnnnnnnnnnnnnnnnnnnnnnnnnnnnnnnnnnnnnnnnnnnnnnnnnnnnnnnnnnnnnnnnnnnnnnnnnnnnnnnnnnnnnnnnnnnnnnnnnnnnnnnnnnnnnnnnnnnnnnnnnnnnnnnnnnnnnnnnnnnnnnnnnnnnnnnnnnnnnnnnnnnnnnnnnnnnnnnnnnnnnnnnnnnnnnnnnnnnnnnnnnnnnnnnnnnnnnnnnnnnnnnnnnnnnnnnnnnnnnnnnnnnnnnnnnnnnnnnnnnnnnnnnnnnnnnnnnnnnnnnnnnnnnnnnnnnnnnnnnnnnnnnnnnnnnnnnnnnnnnnnnnnnnnnnnnnnnnnnnnnnnnnnnnnnnnnnnnnnnnnnnnnnnnnnnnnnnnnnnnnnnnnnnnnnnnnnnnnnnnnnnnnnnnnnnnnnnnnnnnnnnnnnnnnnnnnnnnnnnnnnnnnnnnnnnnnnnnnnnnnnnnnnnnnnnnnnnnnnnnnnnnnnnnnnnnnnnnnnnnnnnnnnnnnnnnnnnnnnnnnnnnnnnnnnnnnnnnnnnnnnnnnnnnnnnnnnnnnnnnnnnnnnnnnnnnnnnnnnnnnnnnnnnnnnnnnnnnnnnnnnnnnnnnnnnnnnnnnnnnnnnnnnnnnnnnnnnnnnnnnnnnnnnnnnnnnnnnnnnnnnnnnnnnnnnnnnnnnnnnnnnnnnnnnnnnnnnnnnnnnnnnnnnnnnnnnnnnnnnnnnnnnnnnnnnnnnnnnnnnnnnnnnnnnnnnnnnnnnnnnnnnnnnnnnnnnnnnnnnnnnnnnnnnnnnnnnnnnnnnnnnnnnnnnnnnnnnnnnnnnnnnnnnnnnnnnnnnnnnnnnnnnnnnnnnnnnnnnnnnnnnnnnnnnnnnnnnnnnnnnnnnnnnnnnnnnnnnnnnnnnnnnnnnnnnnnnnnnnnnnnnnnnnnnnnnnnnnnnnnnnnnnnnnnnnnnnnnnnnnnnnnnnnnnnnnnnnnnnnnnnnnnnnnnnnnnnnnnnnnnnnnnnnnnnnnnnnnnnnnnnnnnnnnnnnnnnnnnnnnnnnnnnnnnnnnnnnnnnnnnnnnnnnnnnnnnnnnnnnnnnnnnnnnnnnnnnnnnnnnnnnnnnnnnnnnnnnnnnnnnnnnnnnnnnnnnnnnnnnnnnnnnnnnnnnnnnnnnnnnnnnnnnnnnnnnnnnnnnnnnnnnnnnnnnnnnnnnnnnnnnnnnnnnnnnnnnnnnnnnnnnnnnnnnnnnnnnnnnnnnnnnnnnnnnnnnnnnnnnnnnnnnnnnnnnnnnnnnnnnnnnnnnnnnnnnnnnnnnnnnnnnnnnnnnnnnnnnnnnnnnnnnnnnnnnnnnnnnnnnnnnnnnnnnnnnnnnnnnnnnnnnnnnnnnnnnnnnnnnnnnnnnnnnnnnnnnnnnnnnnnnnnnnnnnnnnnnnnnnnnnnnnnnnnnnnnnnnnnnnnnnnnnnnnnnnnnnnnnnnnnnnnnnnnnnnnnnnnnnnnnnnnnnnnnnnnnnnnnnnnnnnnnnnnnnnnnnnnnnnnnnnnnnnnnnnnnnnnnnnnnnnnnnnnnnnnnnnnnnnnnnnnnnnnnnnnnnnnnnnnnnnnnnnnnnnnnnnnnnnnnnnnnnnnnnnnnnnnnnnnnnnnnnnnnnnnnnnnnnnnnnnnnnnnnnnnnnnnnnnnnnnnnnnnnnnnnnnnnnnnnnnnnnnnnnnnnnnnnnnnnnnnnnnnnnnnnnnnnnnnnnnnnnnnnnnnnnnnnnnnnnnnnnnnnnnnnnnnnnnnnnnnnnnnnnnnnnnnnnnnnnnnnnnnnnnnnnnnnnnnnnnnnnnnnnnnnnnnnnnnnnnnnnnnnnnnnnnnnnnnnnnnnnnnnnnnnnnnnnnnnnnnnnnnnnnnnnnnnnnnnnnnnnnnnnnnnnnnnnnnnnnnnnnnnnnnnnnnnnnnnnnnnnnnnnnnnnnnnnnnnnnnnnnnnnnnnnnnnnnnnnnnnnnnnnnnnnnnnnnnnnnnnnnnnnnnnnnnnnnnnnnnnnnnnnnnnnnnnnnnnnnnnnnnnnnnnnnnnnnnnnnnnnnnnnnnnnnnnnnnnnnnnnnnnnnnnnnnnnnnnnnnnnnnnnnnnnnnnnnnnnnnnnnnnnnnnnnnnnnnnnnnnnnnnnnnnnnnnnnnnnnnnnnnnnnnnnnnnnnnnnnnnnnnnnnnnnnnnnnnnnnnnnnnnnnnnnnnnnnnnnnnnnnnnnnnnnnnnnnnnnnnnnnnnnnnnnnnnnnnnnnnnnnnnnnnnnnnnnnnnnnnnnnnnnnnnnnnnnnnnnnnnnnnnnnnnnnnnnnnnnnnnnnnnnnnnnnnnnnnnnnnnnnnnnnnnnnnnnnnnnnnnnnnnnnnnnnnnnnnnnnnnnnnnnnnnnnnnnnnnnnnnnnnnnnnnnnnnnnnnnnnnnnnnnnnnnnnnnnnnnnnnnnnnnnnnnnnnnnnnnnnnnnnnnnnnnnnnnnnnnnnnnnnnnnnnnnnnnnnnnnnnnnnnnnnnnnnnnnnnnnnnnnnnnnnnnnnnnnnnnnnnnnnnnnnnnnnnnnnnnnnnnnnnnnnnnnnnnnnnnnnnnnnnnnnnnnnnnnnnnnnnnnnnnnnnnnnnnnnnnnnnnnnnnnnnnnnnnnnnnnnnnnnnnnnnnnnnnnnnnnnnnnnnnnnnnnnnnnnnnnnnnnnnnnnnnnnnnnnnnnnnnnnnnnnnnnnnnnnnnnnnnnnnnnnnnnnnnnnnnnnnnnnnnnnnnnnnnnnnnnnnnnnnnnnnnnnnnnnnnnnnnnnnnnnnnnnnnnnnnnnnnnnnnnnnnnnnnnnnnnnnnnnnnnnnnnnnnnnnnnnnnnnnnnnnnnnnnnnnnnnnnnnnnnnnnnnnnnnnnnnnnnnnnnnnnnnnnnnnnnnnnnnnnnnnnnnnnnnnnnnnnnnnnnnnnnnnnnnnnnnnnnnnnnnnnnnnnnnnnnnnnnnnnnnnnnnnnnnnnnnnnnnnnnnnnnnnnnnnnnnnnnnnnnnnnnnnnnnnnnnnnnnnnnnnnnnnnnnnnnnnnnnnnnnnnnnnnnnnnnnnnnnnnnnnnnnnnnnnnnnnnnnnnnnnnnnnnnnnnnnnnnnnnnnnnnnnnnnnnnnnnnnnnnnnnnnnnnnnnnnnnnnnnnnnnnnnnnnnnnnnnnnnnnnnnnnnnnnnnnnnnnnnnnnnnnnnnnnnnnnnnnnnnnnnnnnnnnnnnnnnnnnnnnnnnnnnnnnnnnnnnnnnnnnnnnnnnnnnnnnnnnnnnnnnnnnnnnnnnnnnnnnnnnnnnnnnnnnnnnnnnnnnnnnnnnnnnnnnnnnnnnnnnnnnnnnnnnnnnnnnnnnnnnnnnnnnnnnnnnnnnnnnnnnnnnnnnnnnnnnnnnnnnnnnnnnnnnnnnnnnnnnnnnnnnnnnnnnnnnnnnnnnnnnnnnnnnnnnnnnnnnnnnnnnnnnnnnnnnnnnnnnnnnnnnnnnnnnnnnnnnnnnnnnnnnnnnnnnnnnnnnnnnnnnnnnnnnnnnnnnnnnnnnnnnnnnnnnnnnnnnnnnnnnnnnnnnnnnnnnnnnnnnnnactggattaatacattggccagcttgacctactctagtgatctttctctcgtgtgcaagtcctcgatcgaccggatactgcttggccggcgatcgctgcgtctctccatcgacctcgatcccgctataggaagcggcaagcaactcaggaaaggaaggaacacacccggaaaggcagctacaggccttggatcaactccaggccgaccgatcgcagcgaagaaccctcgatcggagcgtatactcggacgcagagcgaagactaccgcgctgctccacaaactatccccgcgtcacgccaagacactcgatcttcaccaagtgctgcatcttcggagccccgagagagcagatccagcccgccgacgggtagacaaggtgagaacaagttcagccgatcacggatcgttgggggaccccctccgttagtcggtgtctgggcgctggtgggaagctcgatcaggccttaaccagattttggccgatcccgctacaccacaaaaccatgtcaagagtgagcgtgctgtgcgtggatacgacactaagaagcgcaagtcagatgccaacaccaaggttcaggaccaagggtgtttctactgtttcggccaaggacatcagaaggcacaatgcgagcgcatgaaggccgaccgcgacccaaaccgtgaagggggaacgcttttccgcaccaacttgcaaacccaactttccaagcgggcgcccaacgggactaagaagattgccacggtgcagcacgttaccaagaagcaaaggacgacgcgtgacggacccacggacgtcgagatggaagaagcgttcaagctacctgagtcggaaaaggccggatcggaagacgagaatggaggctgtctgctgagtttcggtcaagtcgacaccagggtacgtaagaagtatggtgcttacttaaattggctactgcgattaacagcttcggatgatctgtggattgttgatacaggagctggactggggataagcccggacaggagctggttcgaatctgtccacacaggttcgagtcaccagtttgagtacggaaacggtagcacgtcggagactgctttaacgggttcaatacagatgcatattgcaagtcctttcaataagtctatcgttttaaagataaggaacattgctctcgattaggaatgtgggagtaatttaattagcgcttgtcatctagccagacaaggttacaatcacgttcaatcccgagatgataagtttttgtattttttcagtgagaaagggcagcttttatttgcagccgttcaaaagggagcagtatattatctgccctcatctaagtacagcagagttaatgcagtaagaaaaagttatacacaagctcagaaaatagctttgctggagaagtggcatcatagattaggccacgttcacaaggccagacttttggcaatatttagcaatggattagttgaaggaattcctcaaattcctcaaaaggaactaaaagatcttcctttcttttgcgctacgtgtgaaatcgcaaattccatgcgaatgttgatggaaggtatggatcttggacacgaagctcggacgaagcggagggagggacgtcgcagacggcgggaccggagcgaaggcacttgaggggtagaatgaagattcgaaagtgattgaattgttggagcttacaccctactgttatagacacgcgaccctgcgtcctatcacctagtgcatctaatcaaccatcactcaccggtgttcatccaatcatcctactcgtctaatcatcggtggcgtaaacaacttaccgtaatcaccataatcaacgtgggttcggattggaccggttcgggttaaccggttaatgggtacaactggtacacagtacccaagaccagcaacccttaatacgccccctcaatgcgaagtcccacgaatgccgagagccaccgtcagatccgtgtggcgtggtcccgcaagcgccttcgtcatgatgtccgctagcatcacagaagtctcgcagtactggagcttgacttcgccgcgcttgacttcatcgcggatggggtggtacttgatgtcgatgtgcttggcgcgaccgtgattcactgggttcttcgtcatcttgatgcacgactggttgtcttcgcggatcatgagttcgggtccagtctcattagcggccgccagaatctcgcatagcaggcgatgaatccacttgccttcttggatagccagactgagcgcgatgtactccgcttcattgcttcttgcttccccagctcacaggcgcactcatgagcatgaacgtgtagcctgaagtggacttgcggtcagcgaggtcgccggcccagtccgcgtccgagtagccacgaaagtcgatcttgtcgcccggcttgaagcagatcccatgcgtcttggtgccttgcaggtagcgaaagatacgcttgaccgcaacccagtgttcctcttgggggttctccatgaagcgcgatacatagccaacggcgtacgcgatgtctgggcgcgtggcggtcatcaggtgcatcagagcaccaacagcttcgcgaaacggagcgttcaccttggtcgccgcgtcgcttggaaccagtcgagtgctcatgtccaccggactcaccacggccttgcactcgtccatggcgaagcgcttcaggatgtcgtccacgtatcgccgctggcacatggtcacgctgccgtccgggccgtccaccaactcgatcccaagaacaaacgcgcacttgccgctgtcggtcatctcgaagcgcgtcttcaggtcggtcttcgtgcgtgcgatcagctcgggcgaactcccggtaatcagtacgtcatccacgtacaccagtacaagcacgcagtgaccgtccaccaccttgatgtagaggcacggatcgaaggccgacacttggaagccgatggagcacacgaactcgtcgaaggtctcgttccacactcgcgaagcttgcttgagaccgtagatggccttcaccagttccaggcagtcgaagtcaccatccagttcgacgccttccggaaccacgcagaagaccacctccttcattatcccgtacaggaatgctgtcaccacgtcgagttggtcgaggggccagccaaaatacttagcaatcgcgatcaccatgcgcagcgtcacatacttgaccacgggcgagaacgtctcggtgtagtcaatgccgtacttctgcttgaagcccttggccacgaggcgcgccttgtacttctcgatcgagccgtccgctttgcgcttgatcttgaacgcccacttggtatcgatggcgcgttgtccgttaggcaacttggcagctcgaaacacaccacgcagtcgcatcgacttgagctccgcgcggatcgctttgcgccagtgcacttgatcaggaccgttcacagcctcttggaacgtcgtcggctccgatagatcggctgctgcttccacagcgatggcactggcacgccaaaacactggaggcgtcgagtcgtcgtcttcatcttggtccccagacttttcttcttcgtcggggtcggctcggcgcgaggaggatacgtccggcgcacttgcttcttctaagccagctcggtggcgaacggggcgcgatgttctggcagtgttgtcgtcgccactcggtcggtacttgcgcttccccgcctgcttgaagctcgtttggcgcggtccatcgttgtcgtccaggtccagcgcgtccaagtccaacacagcatcatcgacgtcttcatccgaagtatgcgtcgaaagtccaaaggtcgactcattgaagttgacatcgcgactgataaccacctgccccgcctcgatgtcataaactcgatacgccttggacacttcttcgtagccgaggaacagcccggcgcgagccttggggtcccacttgcgccgtctttccttcggcgtcaggatgtacgtctggcatccgaacacacgcatgtgcttcacactcggcttggacttgtaaacgatctcgaacggagtcttgtgttcgatcttgggtgatggcagacgattcttcacgtagatggctgtcatggccgcctcagcccagaagctcttgtccagcttggcgtgatgcagcatgctgcggccaatcgtgacgatggtccggatggcgcgttctgccgtgccgttggtctggtgcgcgtacggaaccgtggtttgctgctcgatgccttcgacttcgtagaaggccttgagcgagttggtcgcgaactcacgggctccgtcgtgccgcacaaacttgaccttcttgccgaactgcgtctgcaccttcgtgacgtacatcttgatgcagtcctcgctctccgacttggcacgcaggcagaatcccttcatgcatccgctggcttcgtccacgatcagcagcagatacttgctgccacccagtgactcttcttccatggggccgcacacgtcgaagtggagcagctcgaacgtgtcgtagtgacgcttgtcacggttgcttgggaacggcttctggaccattttcccttgctggcagccgcgacacacgtttggtccactcgacttggaaggtgccttcgcgtccttgatcatgttgttgtcgaccatcttgcgaagcacctccaccggagcgtgacccatacgcgcgtgtaagtcgaccgtcttcccactggtcgccgcattcgccgatcgctgaggcgtctggagccagtagagtccatccacgaggtttgccgtcgccaccacttgcttggagcccttgtgcgcaatctgcatcttggtgctgtcgaacacgacttggaacagaccactcttgttgatctgtggcaccgaaagcagattcttgctcatgcttgggacgtacagcgcgttcttgatctcgatgtcgcgctcgtcgccgttgggcagaaccactcgttccacgatggtccccacacccatgatggccgccttgttgccgtcggccaccgaaagttcgccttcattccgctcaatcaaatgagcgaacttggccttgtcgttgcagatgtggtgcgttgcgccgctgtcgaccgcccacaacccggacacattcttgcccgtcgaaatgccacactccaatgagaccgcgaacgccactcgatcatagccgtagtcgtagttgtagctggcgtcgtcgttcctccactgggcattgttggccccgcgtccacggccattgccattgccgccgcgtcttgggccccgattctcgtccttctgcttggtccagcatttgtcaatcgtgtgccccaatttcccgcagtacgtacactggcgagactctcggtcggtgttgaacgccttggccgcattctccgtcttcaccgtcgccgtcttctcgccttgtctcattcgtcagcaccttcacgacgtcttgcgatcgtagttcagcgctgctcatctccaagttcagcacgacgttctcgtagctcttggggaggctgcgcaacaggcagatcgccacgtcctcatcctccatcttggcgccgatgctgctgagcttggcgctgatgttgaggacctcgttgcaatgatgcaagacgttgccgccttccgacatctccatgctgaagagttggcgcttcaggtagatgcgtccagccttctgcgaaccaccgtacagcgtcttcaggcgcgtccacgcaacccacgcttcctcgcagtcgtcgaccacatggtggtagtccgcgtccatgtggagcaacatcagtccgaacgcgatgttgctcgacttgacgtagtcgtccttggcccgcgagtccgtgaagctcggcgtcgtctcgcggttcacgacatgccacgtcgacttggtcaggaacacgccacgcatgtagcggttccacgtcgcgtagttgtccccgttgaacttgtcaatggagaccttggtcgaggcgtcttgggcagaggacatggtgcttgggctcataacctgatggaaggtatggatcttggacacgaagctcggacgaagcggagggaggacgtcgcagacggcgggaccggagcgaaggcacttgaggggtagaatgaagattcgaaagtgattgaattgttggagcttacaccctactgttatagacacgcgaccctgcgtcctatcacctagtgcatctaatcaaccatcactcaccggtgttcatccaatcatcctactcgtctaatcatcggtggcgtaaacaacttaccgtaatcaccataatcaacgtgggttcggattggaccggttcgggttaaccggtaaatgggtacaactggtacacagtacccaagaccagcaaccctcaatagtaattaaggaaacgtgcatcgattcgctccgtgcaagcacttccgtcgtattgaacgactccctccccagggttttgaagcaccaagagaatcaactgatccagtttcagttgcggcacttttgcgaaggtacatgagcgcattcgggggggttgttcctattttacttgactgtgtctgtttgctgcgaatttataggacccctcatcggagtcgaagtagagcaagcccaattgcttctactcaagaagaagaagaattactactcggtcaagacaccttacacgaaggtgcttacaggaattctcttcaattctccaaaattcatggtctcgtcaaccaacattcacggcgcaccgatcaatcgtacacgagcacagcggtacgatattagagtggatttggcggtagctgggatgctaatatgggttggttggctgcttttacagatacttaaactcgctgagcggcaagctgccacggggtgctacgaaaaggaagagcacttgagcagtagttggcaaaatgcaaagtgattcgattcaggtccttagttcgcaaccgcgtgctacctctaagcctgctactggatacctcttactggatacaccctactggattctctactggatacacagttaccttatccaatcagagaacgccacgtcgatgcccatcttgtacccacaatcttggcgtaatcaccgtgacgtaatcatcgtcccgtaatcacctgaatgattgcggtacaacacagtgaaggtcacgccaacctcactgatgacgcgttcgcgtcacacggtcgcttggcgaggcgtcgtcacatcagtcttgacaacactcccactcgactcgtcagcgaccacgatgcccagcttcgtcctgagcgcgtcgaagtgcggcgccgcgatcggcttcgtcatgatgtccgccagcatgtcgagtgtcgaaacatactgcaacaccacttgaccgtcttccaccttctcgcgcacgaagtggtagcgaatgtcgatgtgcttggtgcgcttgtggaactccgggttcttggccaacgcgatggagccttggttgtcctcgtagatcttcaccgcttcatcgctcgccatctcgcccagctcgcacagaaacaccttgagccacaccgcctcctgcgtggcctccgacagcgccatgtactcggcttccgtcgacgagagcgccaccgtgcgctgcttcttgcttcgccagctgatgcatccgccgttcatcatgaacgcgtagccgctcgtactccgtcgagactcgatgtcgccggcccagtccgcgtccgagtagtcttgcagtccgtcctcgctgctcgcttgaaacacgaggccgtgcgtcttcgtgcctcggatgtagcggaagaccctcttgagcgcctgccagtgtgtcggacatgggtccgctgcgaactggctcagcactcccactgccgctgcgaggtccggacgagtccccaccatgagatacatgaggcagcccacggcgttccggtacggaacattcgccatggtctcgtcgtgcttgcagcctccctcgcacatggccttggtcagcttcagacccggatcctgcggtgtcttcacagggttgctctcatccatcttgaacttctcgagaatgtccttcgcgaacttggtctgccgcaccgacaccttcccagtcgccacatcttgctcgatctccataccgaggaagtacttgagctggcccatgtcagtcatctcgaaccggtcactcagcgcctgcttcgtgtccttcagcatcccgtcgctgctgctggcgaggaccagatcgtccacgtacagtgccacgaacatcatgtcgtgattgtcccgcttcaagtagatgcagtggtcggactcgcacttcttgaaccccagcttcaacatgaactcgtcgatcgtcttgttccacatccgcggcgactgcttcaggccgtacagcgaacgcttgagccggcacacgtagtcgggtcgatctccgtccacatatccgtccggctgcgccatgtagatgtcctcgtccaacaagccgttgaggaacgcggtcttcacatccatctggtgcactgtgagcttgtacttggccgccagactcaacaacacccgaatcgacgtgaacttggccaccggcgcgaacgtctcgtcgtagtcgatgccgtacttctgcgagaaccccttcgccaccagtcgcgccttgaaccgctcgatctctccagactggttctccttcacgcggaacacccatctgcagccgatcgccttgcgtcccttcggcagtggcaccagggtccacgtctcgttcttgcggagcgactccacctccgagtcgcacgcctctttccacttgtctgcgtcgctggattccatcgccgacttgaacgttgtcggcatctctcccactgaatccacgacgtacgcagcctcgaagtcttccttctcttgtgctgcggcagacatctcgtccagcggctgctgtcgtctcggcaccgcataccgcttggcactcggaacctccacggcttcctcgagcgactgcgtccgcgggtgtcgcttgctgccgggttcaaagtcttgattccgcgcagcttcttctctgttctcgtctgatctagactgagtctcttcatccgtggtgtcttcatcatcatctgtcggaagacccaccaacacctccttcgaagcgtagtcgcgtctcccaccgtcgaagacatcctccatgaactgcgcgtcgcggctcaccaacacgcgaccgctctcgatctcctcgaaccgatacgccttctcgtgctccgagtacccgaggaaacgacagcgcaccgaccgagcgtcgaacttcgaccgcttctccttcggcacgtgcacgtacgcgtggcacccgaacaccttgaggttggccagcaaaggcttcttgccggtccaaacgtggtgcggcgacttgtcgtgactgatggcgcgcgtcggacaccggttgcggaggaacgtggccgtcatcaccgcttctccccagtactccttcgacaacccggcgtgctccagcatgcagcgcgcacactccaccagcgtccgattcattcgctcggccactccgttgagctgaggcgtgtatggcggcgtgaacttctgctcgatgccacgatccgcacacaacttggccatcgcacccgaagtgtactcgccgccgttgtcgctccgaagcaccttcactcgcttgccggtctgcgtctcagccaacgcgacgaacgcagcgaacttggcagccacctccgacttggtccgtagcaggtacaccacgcagaagtgcgacttgtcgtcgatgaacgtgacgaagtagcgcttgcctccgaacgtcgccgtctgcatcggaccgcacacatcgctgtggaccacctccagcacttgcttcgcacggttcggcgacgacttcatgaagcttactcgcgtttgcttgccgagtgcgcacccgtcgcacacctcccactgcttcaccgacgtcattgggatgccagtgccgtagcccttcttgacgatggcgtcgagaccaccatggccgatgtgaccaagtcgaaggtgccagaggtacgacgtggtgtccccttggcgattcttcgagcttgccgcattggcctcgtcagcaggcgtcctcggcgtcatgcagagcttgaacagtcctttgccttcgcgagcgccgagcttccacttgagacccttcgtttccgcgaagcacccgtcgctctcgaaggtcactggcccgacgtccttggtgaagcggccgacggagaacaggttgcgcgacagcttcgggatgtgccacacacccgtgagcacacccttcttcatgccgcgcggtgtctgcatcgacatcacgatgtcgccgctccccaccgcctgaaccacgccgtcgtccgccagatgcacgtccaccggagacatcttcttgtagttcttcatgtactccttcgagtacgtcatgtgctgcgtcgcacccgagtcgaccagccacatgccgctcagcttggaggcacccgtgtcgccaccaaccgaggagaggaagtcgccagagtcatcttcgacctgcgcgacgttcgctcgttgcggcctctgccgctccccgttctcgcggatccgcaccggacacttggcgatccaatgtccgtgctcgccgcagtagtgacaggcgctcgtcctctgcgcttgcgcctgccgtcccttgcgcttcccgttgtcgcttgtcatgaacgcttgaccttgagcgtgcgcggttccgtcagcaccgccaccttgttccttgcgcttcatgtcctcgtgcaggagccgagacgtcacgagctccaacgtcagcgtgtcggaacgcgattccaacgccgtgatgaggaactggtacgactcgctcagactggcaagaagcgtgatcaccaagtcgtcctcgctcaccggagcgccgaccgcatcgagctgttccgccagcgtcttgagcttgttaatgtgctccagcacatcatcaccttcgtccatcgttgtcgtgaagaaccgtcgacgaagaaagagcttgttcgccaggctcttcttctcgaagtgtccctcgaggcttgaccatgcatcatgcgcgtccttcgccgaccgcaccagcggcagctgcgagtcctccaacgcgagacagacgatcgccagcgccttgcgcgacttcttgcgaaacgtcgcttggtccgccgcggtcgtgcactgctcgaacttcacttccccactcgtcacttcccacagttcgcgctcctccagcaccatctgcatcttgaacttccatgtgtggaagttagttccgtcgaacttgttgatgcgggcggtcgcggtcggggcggcgtccatggcgaaggcgtagtcggggtcttggtcagggaagacggggcttgggctcataaccaaaaggaagaacacttgagcagtagttggcaaaatgcaaagtgattcgattcaggtccttagttcgcaaccgcgtgctacctctaagcctgctactgggtacctcttactggatacaccctactggattctctactggatacacagttaccttatccaatcagagaacgccacgtcgatgcccatcttgtacccacaatcttggcgtaatcaccgtgacgtaatcatcgtcccgtaatcacctgaatgatttcggtaccacacagtgaaggtcacgccgacctcactgatgacgcgttcgcgtcacacggtcgcttggcggggcgtcgtcacatcagtcttgacaacactcccactcgactcgtcagcgaccacgatgcccagcttcgtcctgagcgcgtcgaactgcggcgccgcgatcggcttcgtcatgatgtccgccagcatgtcgagtgtcgaaacatactgcaacaccacttgaccgtcttccaccttctcgcgcacgaagtggtagcgaatgtcgatgtgcttggtgcgcttgtggaactctgggttcttggccaacgcgatggagccttggttgtcctcgtagatcttcaccgcttcatcgctcgccatctcgcccagctcgcacagaaacaccttgagccacaccgcctcctgcgtggcctccgacagcgccatgtactcggcttccgtcgacgagagcgccaccgtgcgctgcttcttgcttcgccagctgatgcatccgccgttcatcatgaacgcgtagccgctcgtactccgtcgagactcgatgtcgccggcccagtccgcgtccgagtagccttgcagtccgtcctcgctgctcgcttgaaacacgaggccgtgcgtcttcgtgcctcggatgtagcggaagaccctcttgagcgcctgccagtgtgtcggacatgggtccgctgcgaactggctcagcactcccactgccgctgcgaggtccggacgagtccccaccatgagatacatgaggcagcccacggcgttccggtacggaacattcgccatggtctcgtcgtgcttgcagcctccctcgcacatggccttggtcagcttcagacccggatcctgcggtgtcttcacagggttgctctcatccatcttgaacttctcgagaatgtccttcgcgaacttggtctgccgcaccgacaccttcccagtcgccacatcttgctcgatctccataccgannnnnnnnnnnnnnnnnnnnnnnnnnnnnnnnnnnnnnnnnnnnnnnnnnnnnnnnnnnnnnnnnnnnnnnnnnnnnnnnnnnnnnnnnnnnnnnnnnnnnnnnnnnnnnnnnnnnnnnnnnnnnnnnnnnnnnnnnnnnnnnnnnnnnnnnnnnnnnnnnnnnnnnnnnnnnnnnnnnnnnnnnnnnnnnnnnnnnnnnnnnnnnnnnnnnnnnnnnnnnnnnnnnnnnnnnnnnnnnnnnnnnnnnnnnnnnnnnnnnnnnnnnnnnnnnnnnnnnnnnnnnnnnnnnnnnnnnnnnnnnnnnnnnnnnnnnnnnnnnnnnnnnnnnnnnnnnnnnnnnnnnnnnnnnnnnnnnnnnnnnnnnnnnnnnnnnnnnnnnnnnnnnnnnnnnnnnnnnnnnnnnnnnnnnnnnnnnnnnnnnnnnnnnnnnnnnnnnnnnnnnnnnnnnnnnnnnnnnnnnnnnnnnnnnnnnnnnnnnnnnnnnnnnnnnnnnnnnnnnnnnnnnnnnnnnnnnnnnnnnnnnnnnnnnnnnnnnnnnnnnnnnnnnnnnnnnnnnnnnnnnnnnnnnnnnnnnnnnnnnnnnnnnnnnnnnnnnnnnnnnnnnnnnnnnnnnnnnnnnnnnnnnnnnnnnnnnnnnnnnnnnnnnnnnnnnnnnnnnnnnnnnnnnnnnnnnnnnnnnnnnnnnnnnnnnnnnnnnnnnnnnnnnnnnnnnnnnnnnnnnnnnnnnnnnnnnnnnnnnnnnnnnnnnnnnnnnnnnnnnnnnnnnnnnnnnnnnnnnnnnnnnnnnnnnnnnnnnnnnnnnnnnnnnnnnnnnnnnnnnnnnnnnnnnnnnnnnnnnnnnnnnnnnnnnnnnnnnnnnnnnnnnnnnnnnnnnnnnnnnnnnnnnnnnnnnnnnnnnnnnnnnnnnnnnnnnnnnnnnnnnnnnnnnnnnnnnnnnnnnnnnnnnnnnnnnnnnnnnnnnnnnnnnnnnnnnnnnnnnnnnnnnnnnnnnnnnnnnnnnnnnnnnnnnnnnnnnnnnnnnnnnnnnnnnnnnnnnnnnnnnnnnnnnnnnnnnnnnnnnnnnnnnnnnnnnnnnnnnnnnnnnnnnnnnnnnnnnnnnnnnnnnnnnnnnnnnnnnnnnnnnnnnnnnnnnnnnnnnnnnnnnnnnnnnnnnnnnnnnnnnnnnnnnnnnnnnnnnnnnnnnnnnnnnnnnnnnnnnnnnnnnnnnnnnnnnnnnnnnnnnnnnnnnnnnnnnnnnnnnnnnnnnnnnnnnnnnnnnnnnnnnnnnnnnnnnnnnnnnnnnnnnnnnnnnnnnnnnnnnnnnnnnnnnnnnnnnnnnnnnnnnnnnnnnnnnnnnnnnnnnnnnnnnnnnnnnnnnnnnnnnnnnnnnnnnnnnnnnnnnnnnnnnnnnnnnnnnnnnnnnnnnnnnnnnnnnnnnnnnnnnnnnnnnnnnnnnnnnnnnnnnnnnnnnnnnnnnnnnnnnnnnnnnnnnnnnnnnnnnnnnnnnnnnnnnnnnnnnnnnnnnnnnnnnnnnnnnnnnnnnnnnnnnnnnnnnnnnnnnnnnnnnnnnnnnnnnnnnnnnnnnnnnnnnnnnnnnnnnnnnnnnnnnnnnnnnnnnnnnnnnnnnnnnnnnnnnnnnnnnnnnnnnnnnnnnnnnnnnnnnnnnnnnnnnnnnnnnnnnnnnnnnnnnnnnnnnnnnnnnnnnnnnnnnnnnnnnnnnnnnnnnnnnnnnnnnnnnnnnnnnnnnnnnnnnnnnnnnnnnnnnnnnnnnnnnnnnnnnnnnnnnnnnnnnnnnnnnnnnnnnnnnnnnnnnnnnnnnnnnnnnnnnnnnnnnnnnnnnnnnnnnnnnnnnnnnnnnnnnnnnnnnnnnnnnnnnnnnnnnnnnnnnnnnnnnnnnnnnnnnnnnnnnnnnnnnnnnnnnnnnnnnnnnnnnnnnnnnnnnnnnnnnnnnnnnnnnnnnnnnnnnnnnnnnnnnnnnnnnnnnnnnnnnnnnnnnnnnnnnnnnnnnnnnnnnnnnnnnnnnnnnnnnnnnnnnnnnnnnnnnnnnnnnnnnnnnnnnnnnnnnnnnnnnnnnnnnnnnnnnnnnnnnnnnnnnnnnnnnnnnnnnnnnnnnnnnnnnnnnnnnnnnnnnnnnnnnnnnnnnnnnnnnnnnnnnnnnnnnnnnnnnnnnnnnnnnnnnnnnnnnnnnnnnnnnnnnnnnnnnnnnnnnnnnnnnnnnnnnnnnnnnnnnnnnnnnnnnnnnnnnnnnnnnnnnnnnnnnnnnnnnnnnnnnnnnnnnnnnnnnnnnnnnnnnnnnnnnnnnnnnnnnnnnnnnnnnnnnnnnnnnnnnnnnnnnnnnnnnnnnnnnnnnnnnnnnnnnnnnnnnnnnnnnnnnnnnnnnnnnnnnnnnnnnnnnnnnnnnnnnnnnnnnnnnnnnnnnnnnnnnnnnnnnnnnnnnnnnnnnnnnnnnnnnnnnnnnnnnnnnnnnnnnnnnnnnnnnnnnnnnnnnnnnnnnnnnnnnnnnnnnnnnnnnnnnnnnnnnnnnnnnnnnnnnnnnnnnnnnnnnnnnnnnnnnnnnnnnnnnnnnnnnnnnnnnnnnnnnnnnnnnnnnnnnnnnnnnnnnnnnnnnnnnnnnnnnnnnnnnnnnnnnnnnnnnnnnnnnnnnnnnnnnnnnnnnnnnnnnnnnnnnnnnnnnnnnnnnnnnnnnnnnnnnnnnnnnnnnnnnnnnnnnnnnnnnnnnnnnnnnnnnnnnnnnnnnnnnnnnnnnnnnnnnnnnnnnnnnnnnnnnnnnnnnnnnnnnnnnnnnnnnnnnnnnnnnnnnnnnnnnnnnnnnnnnnnnnnnnnnnnnnnnnnnnnnnnnnnccacgtcagcgtgtcggaacgcgattccaacgccgtgatgaggaactggtacgactcgctcagactggcaagaagcgtgattaccaagtcgtcctcgctgaccggagcgccgaccgcgtcgagctgttccgccagcgtcttgagcttgttaatgtgctccagcacatcatcaccttcgtccatcgttgtcgtggagaaccgtcgacgaagaaagagcttgttcgccaggctcttcttctcgaagtgtccctcgagtcttgaccatgcatcatgcgcgtccttcgccgaccgcaccagcggcagctgcgagtcctccaacgcgagacagacgatcgtcagcgccttgcgcgacttcttgcgaaacgtcgcttggtccgccgcggtcgtgcactgctcgagcttcacttccccactcgtcacttcccacagttcgcgctcctccagcaccatctgcatcttgaacttccatgtgtggaagttggttccgtcgaacttgttgatgcgggcggtcgcggtcggggcggcgtccatggcgaaggcgtagtcggggtcttggtcagggaagacggggcttgggctcataaccaaaaggaagaacacttgagcagtagttggcaaaatgcaaagtgattcgattcaggtccttagttcgcaaccgcgtgctacctctaagcctgctactgggtacctcttactggatacaccctactggattctctactggatacacagttaccttatccaatcagagaacgccacgtcgatgcccatcttgtacccacaatcttggcgtaatcaccgtgacgtaatcatcgtcccgtaatcacctgaatgatttcggtaccacacagtgaaggtcacgccgacctcactgatgacgcgttcgcgtcacacggtcgcttggcggggcgtcgtcacatcagtcttgacaacatattcaacgagtcgtgatgagactctgcaaggacgagaacgtcgtctctacgagcaatggttggctgaacagccgcctgcggtcgagcgccgaacttacccgacgccgcgaaagatcctgccgaggccaccggatgcaccgccatggccagaaggtcgtcaacaagctccgttggatgatgagtactcgtcacccgatgtacatggctacgacgacggccccagggtcagtgaaggctcggtcgatgtcgctcgagctgatacaaccgatgtagatcgtgctggtgggtcgaacgatggttcggacgacgaggccagcgcgtcgtatgactcggacgtacccggagactcgccgcctagccgagcgggttgcctgcccgtgaatccgaacagtggtgctgattccaccggccagggagcgacatacgcctcggttgaggcatcggaagccagtgatgagctgagtgatggtgacagcgtgacgaacgacggttcggaggatgaccgcgacgtggtagcagtggccgagacaactacatgggatgtcctgccaacagggaccgctgcgtccagcctggagccagaggaaacgtcggctgcggtgtgtagtagcgaagtcgactggggtgaacacgacccagggcctaacgacgttcctactgaagccggaacctccaccgctgacgccgacactgaattccatgattcggatctaagtgcgatcgacgaccccgagcagctactggaggcgacctatatctcggtcatgcatgccatggttgcagaagggtctggcgaaggtgatgacaccgtgaacgacgtttcggagcacgtcgcgaacgagattgagcttaccgactacgcgcaagagctggcgttcttgccgaacctaaccgaagcgtcggagacgacgctggactactcggggcaaaaaaacgtccagagtgacgaactcagcgtgaagcagcagacggccctggtcgatgtgctgaagagccacgagaagatcatgattgcgagcggtaacgccctgccgcctccagcctacggggtcgtgtgtgacatcaatgtacaggggcatgcgccaatcaagcagaaggctcggcggaccccgcttcgcttcctcggtaagctgtacgaattgctgaagggtctgttgaaggccgggcgtatctccttctcggacagcccatgggcgtcgccaatcgtcatcgtcctgaagaagaatggggtggatatccgcctgtgtatcgactacaaactcgttaatgcgatcaccgagattatggagtacgccatgcccctggtggatgacttgctgacggacatggaggcgtacttgtggttttgctcgcttgacggcgctagcggcttctgggccattatgatgaccgaacgagctcggaagatctctgctttcgtctgcgcactggggcacttcgaatggttgcgtatgcctttcggcctgaagaacgcaccgatgatctatcaacgcatgattgacaacgcgctttggggcttcgtccaaccgacgggaggatggtttaaaattctcggagcgcatgcgtctagctgaagaacatgacaagaaagctcatgctggggtgaacgaggcttcgactggcacggtaaagccattccggaccaagttcgaggccgaccgagacaactcgcttggtaagggagctgtagccgaactggtcaacagccctatcgccgacatgttcgccaacggggagcccgatgactcctcgttgacaccagtattcagtcgccggtcattcgtggatgatatctgtttcggtgccgagactttcgagtcgtgcttggcgacgctagaccgattgctggcacggtttgaagagtgccgtattagtatcagcttcacgaagagcatctttgtgcagtccaaggtagacttcctgtcccacgaagtctcggcagaaggtatccgaccggacgctaagaagctggctggggtggccgagcttccgttcccgtcaacgaggaaaggaatggagcccttccttggagcactcaactattacagtcgcttcatccaagacttcgcggcctattgggccaccccctaccagcttaaggacgaggacttccagcccgggggtgacctcaccgcggccaagcacagcttcgcgatgctccaagagaaggtttcggcagtacggatactacgacacttcgaccggaagaaggaggtgcatgtcatgttgttcgccaacgagcgggctctaagttccacgttgatgcaagagcacgagggcaaactacaccccgttcgcttctgcggacgtgttttgaaggatgctgagatgaattatcacccggccgagaaagaggtcctcgcgcttctgctgatactgaaggtgtgttatactcaactcgttggacagcgaatccgggtctacactcagttttcgacactcgactgggtccacaagtccaagaaattgttcggttgggctacccagttcgccgtcttgctgtcgccgtggcacctgttggtcgaacgagtcaaagaaaccgactgttcgtttgctcagctacttcaacccggcttgacgaacttcgttgacttggataagtcactggcgttggtcacaccccggacacgagggtcaccaactgctcgtttggacccgcatctgctctacgcacgcctaccgcggtcctaccgaggcttcgttatgtcgtttgacgggtctgcgaagaccgagaagaacggtggatacggcagttgctcgtggatactatggaagctaccagagtggacagtagtgcttgctgcgagcgcttacctcgagaacaccacggtcaacctcgctgagtacaccgggatgaacaacggcgtctctgctgcattacagcatggagccgacgatctagttgtcgttggcgactcgaggctcgcgatccagcaagccctagggtgatagcctgtcggaaggagtcattgctgcaacaactcagccaccaccaagaactcacggccaagcttcggtcggtgaagtacctgcatgtggtgagagagtttaacgctgcggccgaccctctggcaagcgagactctcgagtgcaaggaatctacggtggtatcgtcggacgaccgagtattagagctgatgaagctgaaccgtatcgctgaagtcatctacgaggctgctgacgggtgcgtcgtcgaggacataccctcggccaacacagtatgggccgtggtagcttctgccaaacctcatagcaagaattttttcgattttgtgcgaagagaaaccgaccgcagacggcagaacgagactgaacccggacacgtagctgttatgaccagacgtcaaacgagagcaaaggagaaacacgtccggtttgcagatgaagtctcggtcactgatcagggagacgcatctcaccgagtagaagccaatggtgtgccgaacgattctcagaatgaagcagaagcttcaccgctgcgtgccgagacgtcaccagccccaccgaacgcagaagacattgacccgctggtagtacaggaagaacgccaaaggagaatcgcctccgctcaagatgaagagttacggtggtcgaatctgaaggcagtgctccggagatgatgcgaagattggatacagagcagcacgggatgcatggaaaatggcggaccaatttgtgttgagcgaggaggatgtgctatattacacaagaacgagccgtcgttcaagtgacggcgagcaagccgagttgaagatgagactcgtggtgcccacaacgatgatccaagaggtcctgcaaagctgccatgactcacttgaaggcggtcatcaaggtattacccgtacgctacatcgagcggcgagagactattactggatcggccagtatgccgatgtggagaaacacgttaagtcgtgccctgactgcagttcaagtaagagccgacctcagttccgcgggtactcgccagggaacatcctagccgagagacccttccaactagtctctatggacttcgtgataccgctaccgaagagtcgccgtggcaacacggctcttctgctattccaatgctcgttcacgggattcgcgatgggcaaagccatgtctgacactaccgccttactcgttgcgcaagctttcgaggagtgtgtctaccgacgttttggagcaccgtcattgatccgtcatgaccgagatcctcgatttatgagcgaggtcttccacgccttcgcggaaatgatgcagtctcggtcgagagcgaccctgagctaccgcccgcaggccaacggccagcaggagagatcggtgaagacgatcatgcagtcagtccgcgtatacgctgaagacccactacagcaggattgggacgagatcgccgaaagactgatcttcgccatcaacagctcccgtgatacgacgaggaaggaaactccgttttacctcgttcatgggtgggatgcacagtcaacgctcaaggcaatgtcctcgtcactcaaacgaggcttcggtagccaaactgacgcgctagcatggcgccgagaggtcaaccgacagcaggaaatcgccctgaggatggccaaggagtaccaagccgcggaaaaggctcggagagctgaagagcacaatgcgtcgcttggcaggaaggagaaggaagccatggcaggcgtcaacgagaatagaacctcggtcgacggggcaccgagttcccctgaccatagtagagctgcagtgacaagaacgaggttttctttgcagcccgggagcagagtgtggctgtacatggagcgggttcgaccaggactgaccaagaaactagcacatcggtggcacggatcgttccgcgtgaagaagaaggtcgacgaatttgcgtgtgagatggaattacccgaccgaagtggataccggttctacccggtggtgaatgtttcacgactcaagtcagtggacgagttcgaaggccgaccgagggttcgtttggctcgcgaggtcaccgaagacactcgtcttgacttcgacgaggaattactgcctgaagacagttttgagccggaccgcctggacggtgagtatgaagtcgagactatcctcgatgaccggacaccgttgtcaacgagcactcaccgggccgtccgagagttcaaggtgaagtgggtcggctatgacgagccgacatgggaaccagcgtccaatctcgtgcggtggcctcctgtacgattacctacgccggaagcgaagcgaccgacgtttgcaattggtccaggtggccgacgaggagtaattctgcgccccaacgaggattgaactgctcgcgggggcgatccagcccgcgatgtcaggcgaacgaggctactggagatgatgattgaactgcctgcgagggctatccagctcgcagtgacagacgaagaaagttactggaatctgcacgttacgtgttaagtgaacgagtccggccacccatggagcgaccaccatcgaagtccgcagagaaggctcgaccacgaccgacgacgtcacggtttcccgagtcgatccgttggggacaaacaacgggacgtcgttgcaaggggcaaaagccgtgttgtaggggtggtctgccggcgcttggaaccaatagttacgccacggctcgcgggcacccacgtccgccacctcggaggcccagtcgtagtagtggggacccactccatcacctcgaacgagtattgcaggtacgacggctccagcaaaacctcggtgcggtgctgtggaggttgtccgtcgtacgtaatggccccattccacaccttgtggagcatctggtctcgcaagcgatctgcacgatcactgcgctctcggtggtacttggaccacgcttgccgaagcgctaggacttgcacgttgcgctgaccgagggtgctggcgaggttgtcgatatacgccttgacagctttacccctaatccagtagcgacgctcccacaaggcgaaaccaaggtcgcccctctctgtggagtggtaggagtacccctggaactgccgccataggcgaacgagaagagcccgaccagttgcacgacgggatatagccaccgaggatggaaaacccgtcgtatcgatcaaacaaggctcgtctgggaaaagctggcgcaacacttggaaggggtgagcaggatccgtccacaagccaaactccacgattccatccactgaactgggggcgaccaagtcgtcctcgaagacgagggggacactggcgttttggatgaaatgccagcattccgaagctccgggtgccgtgaaacccggctccaagaacagggtagcaagaccactgagcttacgcgatccaggagctacgtcggaagcgtcaaccactgctggggcaatcgacgcaggtccagccctcggtgaagctgtcaccgttgctgttaccatcgcccgagcgtgaacagaggtcgaacgagtgtggagtcgactcgggagtggcacggtggccgcttgtgaagctacaggagccccggtcgcggcagccagaggagaaggagcctccgaaggagcgacaggttgcgccaccgaggtttcctctctttcgtcggggccgaacatctccaggatcaacgctgcgcggtccttggaagtctcggacttatgaggcgactcgccgctaggtgaacggtctggcgggccgccagagtcctcggtgaccccagcagccgattctcgaggggcacggccgacgccggctgtaccagacgagactggcgaaggaatggaagtcgccgccgaaggcgaaacctcggatggaacctcgatgacagtaccggaaggctcggtagcagaaccttgaacaccctgagcgctggccgacacccccggaatctcgccgggctcaaggtcatcttgtgaagtgtcgctaggactcataccccctccaaactccacgtcagacgattcctgctgctgggctggggctggcgagggaggcgaggcgcgacgggccagccgaggatacaaggggacgtctgagtgttcgtagcctccaaccagcttgagcgagccgtcgttggacgcaccatcgaccgaggaggcggggaaatctctcctgatgccgaacgatgactagatggcgcggcggccgctgcagccctggccctcaggtcgactgacggtctgccgaagcgtttgtgaggaggaggctgggatgccgtattcccgacggaagcagactcggtttgccgaccccgcttgcgcgatgacgactcagtggagaccggggaaccagcagaagcgctcaccgaagcagcgggagcggacgtagcctcggtggactcagccatcggcacgtcggtcgtcttggactcctctccctcctctgacgaggattcgtcatggcgtggactctcgacagtgaccgtcggtggggacagcccgagaagattccaatcaatctctgcggcggagatgccggctgaggccagggccaaggtgtcgacgtcgagtccgtgtgctgccgagtgccgacgaaggatagaattcgctcgccacaagctgttgttctcgtccgtcaacgcttgaatgcgtgcggggatgacgtttgctcggtcgcggtcggccaactgcttccgaagcctctccaactgagtgttgtaggtgacgaggcttgcacttatacgctcgtggagctgggtgttccgacgtacagcagcggccgaatcggcctcagcaacgagcgtccgcttctccaacgactgagtgacgccagcgtggtgagcgatggccgcgttcgcttgcatcaactgagcgctagcgttgctgagctggacgcgcatgtcctggacgaggtccagagcttggtcgcactcggagttggccgagacgaggaagtagtccgacttggtccgcaggttcatcgcttcagcgagtttatcattggcgtcggagagctctgcctgcagccggtcgttctcgcggcggagggctaccagttcatcagcctccgcaagagggagacgcggaggagcaacggcggcagccagcacctcaccgacgttagtagcagcttgcaggctgcggtcgagagcagcgttgactcgagctggaggtgaacgggcaacacccacgacgagacgagcgagttccagcatctgctgctcgcccaagacgaccgctgtcggaggaacctcggccgggccagcaccagctccggcgcgacagctgcctcgccccccccaccgacgccccgcgagttgccaacgtgaccgaaggcgcgggagttggcgacggtggagcgctggcgcttggcggcggtgtcggcggcgagtcgggagcctcttcactgggaactgccggcgagggagtctcggtcgccccaccagcagactcaggactacttggaggagccggtggagggtcgaccgaggtcccggaggcggcaggaatgagcgtagggtcacatgcaggcgcggccggggctgggggcacacgataggggcgggggcacccgccgaacgagcctggcgcgccggacgacgacccgaagtgtcggtggcgacatcaacagctccctgagatgatcaagaaagagatggagtcaacaacgaggatccgaatgacagtcaggagcagcaggagcgacgaacgtaccggtccggagcactggagagcccgaagagcagcggcagccacgtcggcaaatgcacgcgacggaggagccatggagtcgaagaactgaggacgcctagacgctcaccagcgtgggaggctcgcgtcgtggcggcggcagttgtggtattggaaagtggcagtttccaacgctattgacccgccagcccgacaatcaagttcaatcaaggggcgatcaaggcgaggtcaagcgagagacggagatggctgcttctgattggatgatgacattatcctcggtagagtgacaggcagtggccgaagcctcgtcgggtcctaatagaaccccgaacgaggcttcatggtacccacttttaggtacagatgcatttagttacgtacttcggccgcacttattagcgtagccgcggtcgtcatttgatgtgtccgaaatcgccttattgcgatcgttcacactagatatttgtatagggacataggactcatcataggatggccagaacgaggcccccagggcctcagaaaactcagtaataaaaagacagtcttcccccaaagccaacaagggtcaagtccgacttcggtaagtgtagctagcttattgtagtgcctggacacgctcggctgcgtgtggatgcctgtcggggagcttatcgtgcattgaccgagagtttccttggcagcgccaagagttggcgtggccggagaggcaggaacggtattagagtatcgttcggtatatatttgtgggattggagtatccctgagtgtattagtctacctaccgaggttttaccttggtccccctgtataaggcctaacacgccggtacccttcctttttgaaggactgcagtggggttgcgcgaaagcgctacatagtatcctagccttagctcgtggctagtggtacaggtttttgggttgaccgaagataacctaaggtgcacagaggcgcttgcaaccgacccggtgtaagggatcgttcctggtcttcaggttttgatccaataagcgcttacctttgcgggttagcgtgttgttggtgtctctaataccttttggtagaggaggattttattgaattaccacaccacaacaaggtgaaagcttcggcggtcttaccttgagcgtgtaacgtggtgagagcagtggcagcgggcgcgggaagtgtcttgatcgacttgatgcaatggctggctgctattaaagtgacaacattactcgacaaatcgccaaggcatcattggtcctcgattttcgtacttttcagagtttcctcgatgagcagacgtcgtttcctcgataaaaagctacacccctaaccagatagggaacacatggtcagttagaggggttcatttagggaggtgtcactgtactaccttcggtccgaaaaacaaatatacattgaccaaattgaactattagtgacagaccaatcagattgaaggtaatatttaggcttaatattaccgctaccaaaccgacgttttaggctaaatcatcgaaagccgcaaccgcctcagccgaatacggcaaacagcgaggcaggctaccattcctggtcagggcatcttttctcaggtgtgggatgttgtagctgttgccaccaccagccagcatagatgcctcaagtacgctttgcagcgtaaggaagcacttgttggtggtggcacttgacatctcctcaaacgcggcattcacggccgcgatgagcccgtcgacgtcacccgtctgctttctgtactgcagcgactgcagcgagcataaccagctcaagtcgagcacgatgaagtcagggcttcgcggcggctggttggcgaacttaatcgaccagccccccgatgcagctgctgctttcactgcagtccgctcggaggcgcggtgaggcggggcgttgtcctgctgtacgatcacctcttccttacctatatataaaaatagtcgtaataaaaatagtcagcataaaacataataaaacacgttgcaaaacaattacctggccaaactcgcttgatcgcggggattacgtgctgtgtcagcatgcgctcgtagacgtccttcgtcatctcgactggggtcgtgaccggagtacccttcgggcggttcgtgctgctgcggacggccagcttggtctccaccacgggccacagtcccacctttccgtcaaaggtcatgcgctggtactcgtcataccgtggccgcgcgaccgccaccaaaaccattacctttgttcggtggttcttgttcttggtgacggcgcgcggcgcaggctcgtcgctagtaaggtagtgttgcggttccggtggacgtagaaccacctttcgtcaacatgcaccacattctgcatgccatcgaattggtatccgcgatcacctaaatgacagacattacattacatatcgtcaggcattgcatatattactcgtaacagataactagacagtcaaaactcttaccatgaatcttcgtcacaaaagtccgtgcaaactgacggcgctgcgccatgtgctccggcgtgagcagcggcttcggcacaaccgtgactcgcctgaccacgcttcgctcctgcaagcgccggaagagctgggtccgcgggatacctgtggcggcggcgagaccacgcagcgtggtccgactatccactgaagccgacgtgtggtgaagcaccgaacaagaatttccaactgcgatgacatcaagcgacatggtggcagaacgataggcagggatcaggctgcggtcgcggatcaagagggtctatcgagagatctcaagcgattggataacgtcgacgcgtaaggcaacacatatgtcaagacagattacgggcgatcgcgcttggactgcggcgtgattcgacgtagacccaagcccggatcgacgaccaatctcgcagatctagggcggccgaggacagaagaggacggatcggcagcgcacggcaactcgcacaggtcatcgatcgggagttgatcgccgatcgccgatcgggatcgatcgtggatcaggaggcgatcgtggatcggggtcgatcgtggattgggagccgatcgtggatcgccgatcgacccggatgggaagcacatgggggcgaagccagggcaagaatccagtaatcgtttggttgtaggatggtaggtgagatggcagcggtagagagagatcagctaaacataaatcagaacgcaatttgcacagaagaccacaagtgctctcaagtcgtcaagtcccaagagctacattggcctcggcaagcgttgacacttcgggtagtgaactagcggaacggttaagactggattaatacattggccagcttgacctactctagtgatctttctctcgtgtgcaagtcctcgatcgaccggatactgcttggccggcgatcgctgcgtctctcaatcgacctcgatcccgctataggaagcggcaagcaactcaggaaaggaaggaacacacccggaaaggcaactacaggccttggatctactccaggccgaccgatcgaagcgaagaaccctcgatcggagcgtatactcggacgcagagcgaagactagcgcgctgctccacaaactatccccgcgacacgccaagacactcgatcttcaccaagtgctgcatcttcggagccctgagagagcagatccagcccgccgacgggtacacaaggtgagaacaagttcagccgatcacggatcgttgggggaccccctccgttagtcggtgtctgggcgctggtgggaagctcgatcaggccttaaccagattttggccgatcccgctacacaacaatggtgcgcgtgcccggattcgaaccagggatttcaccgtgagtccgtagaagatgcgcgagtgaagaaagaaccaggggaagaggcgtcgtcggatatcggatcgacgaagacgctgctgaacaaaacgagatccgcggatcgacagagtgctcggaggacttctgtcgacggaatcgagggcgatctggagacagatctagaagacaaacctcaacatcctccccaggtcccttcggggaccccggtggatcttggtgcgaaccgagattcactaacaaaacacactaaggcgggatcggaccgatacgcgttcgctgactcgccgatcaggctcgatccgagctacctggacgcgatcgcggacaagacccagatcgtgagaaagaagctgagagcgccaggcttggacgacgaagatcccagaccgtcggcgctcgactggtctgaggctgacctggatcgccagtattacttgaaggaactgcgagatttcttgcgtcaagatcctgtcatggtgatcgtgcggccagagcagatcgacgacccgaagggtccgatttcggccccccccgagtgacggataacaagctgatggcggtgaagaacctactcgggctgttgaaggaagccggcttcatggctggcgcctttgaagcgaacgatcatttcgatcaagatctcgatgtgatccagacagcgatccagacattggtcgacaagttgagacctttggtcgacatgatcgcggacagtccggacccgaaggtgccagatccagtgtcgccggctccagtgtcatcgcagcgagtggagtccactgggtaccgatcgtcgtcaccttatgtctccgcagcggaatatgtatcggatacgtcgtctgaaccccaacggatgaccctcggcccttcaggatctgcgatgttggacgcgcgatcacggagtcaacttcaggaacgcatgcggtcaggacctcggaagcagaaacccaagtcgaccgatcggaccaccagtgccaccggatcagatgagtcgaatggcagactggagtcttacttccaggctgcgatgactcgatttctgaaggaacaacaggccacggtggtaacacctactccagtggtcgacgacaacgttggatcgcgggacgtggagatggaatcagccggatcgccggatcaagatctctctcagtgggaatacgatccggacgacattgatctaccgcattcggcccctgctgtggtggccaccgctgcctcgggatccactgggtcctccttgatccagcgcgtgcgaatctcggcgatgtccgatctcaaggagttcagtggcaaggatcaggacgaagatcgcgcccgttcgtgggtcagcaaggtgaaatcggagttcctgcgagatcaggctacggacgaagagaagtgcctgaccttcgctgatctactgacgggcccggcgaagaactggtaccgccagctgggccgatcgacgcggaacaagtggagcgatctactccggagtttccagatccagtattgtggcctgggagtatcggtcgcttggcagtattatcattctcgcaagagatcggatgaatcgccgttggagtacctctatcgactgaatgtggcggctctatgtgcaagattgaagatcaaggacggggattccaaggcccgccgagaacatgtcgaacactttatcgagacacggggcgatccggaactggccgatcagctcaccttactccggcttgcggacgcggaagatcttgaggaagtcctgcgcgctcgagagcgcgcgaagagcagacagaagcgatctgcctttggatcgaagtatcgtcagaaggttccgacctccgcaccagctgctgcaaccaagcgggcagtgcgtgcagtgcagatcgcgagccaggagtctggatcggacacgggatcagacggatcggactcggagggtgatctacgtcgcgtttacctagcgtcggccgaggacaagtctcgcaaagctgggggcgacgcgacgaagccggatcgaagcaaccaggcgcagatcaaccatgacccacctcgatcggatccacgatcgcgatcttcacctgacggatcggagcgtgatggaaggtatggatcttggacacgaagctcggacgaagcggagggagggacgtcgcagacggcgggaccggagcgaaggcacttgaggggtagaatgaagattcgaaaggtgattgaattgttggagcttacaccctactgttatagacacgcgaccctgcgtcctatcacctagtgcatctaatcaaccatcactcaccggtgttcatccaatcatcctactcgtctaatcatcggtggcgtaaacaacttaccgtaatcaccataatcaacgtgggttcggattggaccggttcgggttaaccggttaatgggtacaactggtacacagtacccaagaccagcaaccctcaatacgccccctcaatgcgaagtcccacgaatgccgagagccaccgtcagatccgtgtggcgtggtcccgcaagcgccttcgtcatgatgtccgctagcatcacagaagtctcgcagtactggagcttgacttcgacgcgcttgacttcatcgcggatgtggtggtacttgatgtcgatgtgcttggcgcgaccgtggttcactgggttcttcgtcatcttgatgcacgactggttgtcttcgcggatcatgagttcgggtccagtctcattagcggccgccagaatctcgcatagcaggcgataaatccacttaccttcttggatagccagactgagcgcgatgtactccgcttcgctcgtggacagcgacacacttgattgcttcttgcttccccagctcacaggcgcactcatgagcatgaacgtgtagcctgaagtggacttgcggtcggcgaggtcgccggcccagtccgcgtccgagtagccacgaaagtcgatcttgtcgcccggcttgaagcagatcccatgcgtcttggtgccttgcaggtagcgaaagatacgcttgaccgcaacccagtgttcctcttgggggttctccatgaagcgcgatacatagccaacggcgtacgcgatgtctgggcgcgtggcggtcatcaggtgcatcagagcaccaacagcttcgcgaaacggagcgttcaccttggtcgccgcgtcgcttggaaccagtcgagtgctcatgtccaccggactcaccacggccttgcactcgtccatggcgaagcgcttcaggatgtcgtccacgtatcgccgctggcacatggtcacgctgccgtccgggccgtccaccaactcgatcccaagaacaaacgcgcacttgccgctgtcggtcatctcgaagcgcgtcttcaggtcggtcttcgtgcgtgcgatcagctcgggcgaactcccggtaatcagtacgtcatccacgtacaccagtacaagcacgcagtgaccgtccaccaccttgatgtagaggcacggatcgaaggccgacacttggaagccgatggagcacacgaactcgtcgaaggtctcgttccacactcgcgaagcttgcttgagaccgtagatggccttcaccagttccaggcagtcgaagtcaccatccagttcgacgccttccggaaccacgcagaagaccacctccttcattatcccgtacaggaatgctgtcaccacgtcgagttggtcgaggggccagccaaaatacttagcaatcgcgatcaccatgcgcagcgtcacatacttgaccacgggcgagaaggtctcggtgtagtcaatgccgtacttctgcttgaagcccttggccacgaggcgcgccttgtacttctcgatcgagccgtccgctttgcgcttgatcttgaacacccacttggtatcgatggcgcgttgtccgttaggcaacttggcagctcgaaacacaccacgcagtcgcatcgacttgagctccgcgcggatcgctttgcgccagtgcacttgatcaggaccgttcacagcctcttggaacgtcgtcggctccgatagatcggctgctgcttccacagcgttggcactggcacgccaaaacactggaggcgtcgagtcgtcgtcttcatcttggtccccagacttttcttcttcgtcggggtcggctcggcgcgaggaggatacgtccggcgcacttgcttcttctaagccagctcggtggcgaacggggcgcgatcttctggcagtgttgtcgtcgccactcggtcggtacttgcgcttccccgcctgcttgaagctcgtttggcgcggtccatcgttgtcgtccaggtccagcgcgtccaagtccagcacagcatcatcgacgtcttcatccgaagtatgcgtcgaaagtccaaaggtcgactcatcgaagttgacatcgcgactgataaccacctgtcctgcctcgatgtcataaactcgatacgccttggacacttcttcgtagccgaggaacagcccggcgcgagccttggggtcccacttgcgccgtctttccttcggcgtcaggatgtacgtctggcatccgaacacacgcatgtgcttcacactcggcttggacttgtaaacgatcttgaacggagtcttgtgttcgatcttgggtgatggcagacgattcttcacgtagatggctgtcatggccgcctcagcccagaagctcttgtccagcttgacatgatgcagcatgctgcggccaatcgtgacgatggtccggatggcgcgttctgccgtgcggttggtctggtgcgcgtacggaaccgtggtttgctgctcgatgccttcgacttcgtagaaggccttgagcgagttggtcgcgaactcacgggctccgtcgtgccgcacaaacttgaccttcttgccgaactgcgtctgcaccttcgtgacgtacatcttgatgcagtcctcgctctccgacttggcacgcaggcagaaccccttcatgcatccgctggcttcgtccacgatcagcaacagatacttgctgccacccagtgactcttcttccatggggccgcacacgtcgaagtggagcagctcgaacgtgtcgtagtgacgcttgtcacggttgcttgggaacggcttctggaccattttcccttgctggcagccgcgacacacgcttggtccactcgacttggaaggtgccttggcgtccttgatcatgttgttgtcgaccatcttgcgaagcacctccaccggagcgtgacccatacgcgcgtgtaagtcgaccgtcttcccactggtcgccgcattcgccgatcgctgaggcgtctggagccagtagagtccatccacgaggtttgccgtcgccaccacttgcttggagcccttgtgcgcaatctgcatcttggtgctgtcgaacacgacttggaacagaccactcttgttgatctgtggcaccgaaagcagattcttgctcatgcttgggacgtacagcgcgtttttgatctcgatgtcgcgctcgtcgccgttgggcagaaccactcgttccacgatggtccccacacccatgatggccgccttgttgccgtcggccaccgaaagttcgccttcattccgctcaatcaaatgagcgaacttggccttgtcgttgcagatgtggtgcgttgcgccgctgtcgaccgcccacaacccggacacattcttgcccgtcgaaatgccacactccagtgagaccgcgaacgccactcgatcatagccgtagtcgtagttgtagctggcgtcgtcgttcctccactgggcattgttggccccgcgtccacggccattgccattgccgccgcgtcttgggccccgattctcgtccttctgcttggcccagcacttgccccaatttcctgcagtacgtacactggcgagactctcggtcggtgttgaacgccttggccgcattctccgtcttcaccgtcgccgtcttctcgccttgtctcttgatgtgctcattcgtcagcaccttcacgacgtcttgcgatcgtagttcagcgctgctcatctccaagttcagcacgacgttctcgtagctcttggggaggctgcgcaacaggcagatcgccacatcctcatcctccatcttggcgccgatgctgctgagcttggcgctgatgttgaggacctcgttgcaatgatgcaagacgttgccgccttccgacatctccatgctgaagagttggcgcttcaggtagatgcgtccagccttctgcgaaccaccgtacagcgtcttcaggcgcgtccacgcaacccacgcttcctcgcagtcgtcgaccacatggtggtagtccgcgtccatgtggagcaacatcagtccgaacgcgatgttgctcgacttgacgtagtcgtccttggcccgcgagtccgtgaagctcggcgtcgtctcgcggttcacgacatgccacgtcgacttggtcaggaacacgtcacgcatgtagcggttccacgtcgcgtagttgtccccgttgaacttgtcaatggagaccttggtcgaggcgtcttgggcagaggacatggtgtttgggctcataacctgatggaaggtatggatcttggacacgaagctcggacgaagcggagggagggacgtcgcagacggcgggaccggagcgaaggcacttgaggggtagaatgaagattcgaaaggtgattgaattgttggagcttacaccctactgttatagacacgcgaccctgcgtcctatcacctagtgcatctaatcaaccatcactcaccggtgttcatccaatcatcctactcgtctaatcatcggtggcgtaaacaacttaccgtaatcaccataatcaacgtgggttcggattggaccggttcgggttaaccggttaatgggtacaactggtacacagtacccaagaccagcaaccctcaatagagcgatcaagccgctgctcacactgtggatcgcggaaacacaccgatctcgattgttggagacgtttgacgtgcgagaagtgtcgcaagagaggtcatccggcggatcgctgcctgtttgtgtgccgtggatgtggtgaactacacgagatgggcaagtgtccgatggaggaattctacaaccagatccgtcaatggttcaacccggtgaagcacgctggcatgttgcccgcgatcgccgagaagatgttaaactaggacgctcgccgagttggaatccggtacgagccgagcgttctaggtactgcatctatacattcgtgaacaagaacacggtagatcgagtaagtggacggactgatctacgcggtaatacatgtcatctgcatgcgaaatttgccgccaaggtcttaagtctacatcgatcggacgacctctgccgttctgacgccgaagtgcctttggatctccagtctggagaaacgcggggctattgaaagcaacgcagaccggaagaatggttcacgccagctgatggagaagtgacgaccgagatcccggagcatgatcgcgatcgaagtcggcctcgcgtcagcgaacaccgcagatctggcgatgtggtgctcctccctggggagtccagagggtactggaaacatcattcgccaggtaagtggttccgtcaggccaagatcactggcaagatcaacaatgagaagtcgatcttactcttagaaaccggcgccgaggtgtccatcgtggacaccgcctttgctcgtaaggtggggtgctatgtcgacacgagtcagagccaggaatgtgtggtgattggcgaaagcgtgtacatgacggaaggaaggaccagggtcaaggttacgctggcgggatcgctggtgcatttcttcgatatctgggttggcgatctatcaggacaagaggcgatcctgggtatggactttatggttccagccgggatccgcctcgatcttgcggacggctctatctgtctccccgacgaagtcaatatccagcttagcagacggcgtcagctgtacaacgacaatgtcagacacgtgtgtatagatcagggaatgcagatcgcgatcggggattcgatcgagcttccgctacgaatgaagatgacggatcgagaaaagctgtgggtcacccgtggagatcgctgggtgccgaccgtggtccgaggacccggccggatccgatatctccaggttaccaacatcagcgacaaagacctcgtcttgcatcggaatgaacggatcgcgatgtggctggctggagatcggataccccgaatcccaggatatgtgtcgatcggatctcgtcgatacatggaatggcagaatctagcctttcaagccacgacagatgaccggccgacgaaccaagaggcaccaacgggacctccagtacctgccgtcgagcgaccgaattatccaacgccccgagccattcttcagagacgcaaggtatccccgatcatcgatcagtcgacgagtccacccgatccaacaagcgaaccggaggcaatgagccctgatccgggggcgaccgtcgttgatacgcttagatcaggaggcagaccgttgcaggacgatgatcgcgtgacagaggagtcgaggtcgtcagcttcaactgttctcgttggagatccaccagacccacggtcggatccggttgagtcggtgtgtgaaccttccggattgatggaaggtatggatcttggacacgaagctcggacgaagcggagggagggacgtcgcagacggcgggaccggagcgaaggcacttgaggggtagaatgacgattcgaaagtgattgaattgttggagcttacaccctactgttatagacacgcgaccctgcgtcctatcacctagtgcatctaatcaaccatcactcaccggtgttcatccaatcatcctactcgtctaatcatcggtggcgtaaacaacttaccgtaatcaccataatcaacgtgggttcggattggaccggttcgggttaaccggttaatgggtacaactggtacacagtacccaagaccagcaaccctcaatagagcgatcaagccgctgctcacactgtggatcgcggaaacacaccgatctcgattgttggagacgtttgacgtgcgagaagtgtcgcaagagaggtcatccggcggatcgctgcctgtttgtgtgccgtggatgtggtgaactacacgagatgggcaagtgtccgatggaggaattctacaaccagatccgtcaatggttcaacccggtgaagcacgctggcatgttgcccgcgatcgccgagaagatgttaaactaggacgctcgccgagttggaatccggtacgagccgagcgttctaggtactgcatctatacattcgtgaacaagaacacggtagatcgagtaagtggacggactgatctacgcggtaatacatgtcatctgcatgcgaaatttgccgccaaggtcttaagtctacatcgatcggacgacctctgccgttctgacgccgaagtgcctttggatctccagtctggagaaacgcggggctattgaaagcaacgcagaccggaagaatggttcacgccagctgatggagaagtgacgaccgagatcccggagcatgatcgcgatcgaagtcggcctcgcgtcagcgaacaccgcagatctggcgatgtggtgctcctccctggggagtccagagggtactggaaacatcattcgccaggtaagtggttccgtcaggccaagatcactggcaagatcaacaatgagaagtcgatcttactcttagacaccggcgccgaggtgtccatcgtggacaccgcctttgctcgtaaggtggggtgctatgtcgacacgagtcagagccaggaatgtgtggtgattggcgaaagcgtgtacatgacggaaggaaggaccagggtcaaggttacgctggcgggatctctggtgcatttcttcgatatctgggttggcgatctatcaggacaagaggcgatcctgggtatggactttatggttccagccgggatccgcctcgatcttgcggacggctctatctgtctccccgacgaagtcaatatccagcttagcagacggcgtcagctgtacaacgacaatgtcagacacgtgtgtatagatcagggaatgcagatcgcgatcggggattcgatcgagcttccgctacgaatgaagatgacggatcgagaaaagctgtgggtcacccgtggagatcgctgggtgccgaccgtggtccgaggacccggccggatccgatatctccaggttaccaacatcagcgacaaagacctcgtcttgcatcggaatgaacggatcgcgatgtggctggctggagatcggataccccgaatcccaggatatgtgtcgatcggatctcgtcgatacatggaatggcagaatctagcctttcaagccacgacagatgaccggccgacgaaccaagaggcaccaacgggacctccagtacctgccgtcgagcgaccgaattatccaacgccccgagccattctccagagacgcaaggtatccccgatcatcgatcagtcgacgagtccacccgatccaacaagcgaaccggaggcaatgagccctgatccgggggcgaccgtcgttgatacgcttagatcaggaggcagaccgttgcaggacgatgatcgcgtgacagaggagtcgaggtcgtcagcttcaactgctctcgttggagatccaccagacccacggtcggatccggttgagtcggtgtgtgaaccttccggattgatggaaggtatggatcttggacacgaagctcggacgaagcggagggagggacgtcgcagacggcgggactggagcgaaggcacttgaggggtagaatgacgattcgaaagtgattgaattgttggagcttacaccctactgttatagacacgcgaccctgcgtcctatcacctagtgcatctaatcaaccatcactcaccggtgttcatccaatcatcctactcgtctaatcatcggtggcgtaaacaacttaccgtaatcaccataatcaacgtgggttcggattggaccggttcgggttaaccggttaatgggtacaactggtacacagtacccaagaccagcaaccctcaatagcatctaatcaactatcactcaccggtgttcatccaatcatcctactcgtctaatcatcggtggcgtaaacaacttaccgtaatcaccataatcaacgtgggttcggattggaccggttcgggttaaccggttaatgggtacaactggtacacagtacccaagaccagcaaccctcaatacgccccctcaatgcgaagtccgacgaatgccgagagccaccgtcagatccgtgtggcgtggtcccgcaagcgccttcgtcatgatgtccgctagcatcacagaagtctcgcagtactggagcttgacttcgacgcgcttgacttcatcgcggatgtggtggtacttgatgtcgatgtgcttggcgcgaccgtggttcactgggttcttcgtcatcttgatgcacgactggttgtcttcgcggatcatgagttcgggtccagtctcattagcggccgccagaatctcgcatagcaggcgataaatccacttaccttcttggatagccagactgagcgcgatgtactccgcttcattgcttcttgcttccccagctcacaggcgcactcatgagcatgaacgtgtagcctgaagtggacttgcggtcggcgaggtcgccggcccagtccgcgtccgagtagccacgaaagtcgatcttgtcgcccggcttgaagcagatcccatgcgtcttggtgccttgcaggtagcgaaagatacgcttgaccgcaacccagtgttcctcttgggggttctccatgaagcgcgatacatagccaacggcgtacgcgatgtctgggcgcgtggcggtcatcaggtgcatcagagcaccaacagcttcgcgaaacggagcgttcaccttggtcgccgcgtcgcttggaaccagtcgagtgctcatgtccaccggactcaccacggccttgcactcgtccatggcgaagcgcttcaggatgtcgtccacgtatcgccgctggcacatggtcacgctgccgtccgggccgtccaccaactcgatcccaagaacaaacgcgcacttgccgctgtcggtcatctcgaagcgcgtcttcaggtcggtcttcgtgcgtgcgatcagctcgggcgaactcccggtaatcagtacgtcatccacgtacaccagtacaagcacgcagtgaccgtccaccaccttgatgtagaggcacggatcgaaggccgacacttggaagccgatggagcacacgaactcgtcgaaggtctcgttccacactcgcgaagcttgcttgagaccgtagatggccttcaccagttccaggcagtcgaagtcaccatccagttcgacgccttccggaaccacgcagaagaccacctccttcattatcccgtacaggaatgctgtcaccacgtcgagttggtcgaggggccagccaaaatacttagcaatcgcgatcaccatgcgcagcgtcacatacttgaccacgagcgagaacgtctcggtgtagtcaatgccgtacttctgcttgaagcccttggccacgaggcgcgccttgtacttctcgatcgagccgtccgctttgcgcttgatcttgaacacccacttggtatcgatggcgcgttgtccgttaggcaacttggcagctcgaaacacaccacgcagtcgcatcgacttgagctccgcgcggatcgctttgcgccagtgcacttgatcaggaccgttcacagcctcttggaacgtcgtcggctccgatagatcggctgctgcttccacagcgttggcactggcacgccaaaacactggaggcgtcgagtcgtcgtcttcatcttggtccccagacttttcttcttcgtcggggtcggctcggcgcgaggaggatacgtccggcacacttgcttcttctaagccagctcggtggcgaacggggcgcgatcttctggcaatgttgccgtcgccactcggtcggtacttgcgcttccccgcctgcttgaagctcgtttggcgcggtccatcgttgtcgtccaggtccagcgcgtccaagtccagcacagcatcatcgacgtcttcatccgaagtatgcgtcgaaagtccaaaggtcgactcatcgaagttgacatcgcgactgataaccacctgccccgcctcgatgtcataaactcgatacgccttggacacttcttcgtagccgaggaacagcccggcgcgagccttggggtcccacttgcgccgtctttccttcggcgtcaggatgtacgtctggcatccgaacacacgcatgtgcttcacactcggcttggacttgtaaacgatctcgaacggagtcttgtgttcgatcttgggtgatggcagacgattcttcacgtagatggctgtcatggccgcctcagcccagaagctcttgtccagcttggcgtgatgcagcatgctgcgaccaatcgtgacgatggtccggatggcgcgttctgccgtgcggttggtctggtgcgcgtacggaaccgtggtttgctgctcgatgccttcgacttcgtagaaggccttgagcgagttggtcgcgaactcacgggctccgtcgtgccgcacaaacttgaccttcttgccgaactgcgtctgcaccttcgtgacgtacatcttgatgcagtcctcgctctccgacttggcacgcaggcagaaccccttcatgcatccgctggcttcgtccacgatcagcagcagatacttgctgccacccagtgactcttcttccatggggccgcacacgtcgaagtggagcagctcgaacgtgtcgtagtggcgcttgtcacggttgcttgggaacggcttctggaccattttcccttgctggcagccgcgacacacgcttggtccactcgacttggaaggtgccttcgcgtccttgatcatgttgttgtcgaccatcttgcgaagcacctccaccggagcgtgacccatacgcgcgtgtaagtcgaccgtcttcccactggtcgccgcattcgccgatcgctgaggcgtctggagccagtagagtccatccacgaggtttgccgtcgccaccacttgcttggagcccttgtgcgcaatctgcatcttggtgctgtcgaacacgacttggaacagaccactcttgttgatctgtggcaccgaaagcagattcttgctcatgcttgggacgtacagtgcgttcttgatctcgatgtcgcgctcgtcgccgttgggcagaagcactcgttccacgatggtccccacacccatgatggccgccttgctgccgtcggccaccgaaagttcgccttcattccgctcaatcaaatgagcgaacttggccttgtcgttgcagatgtggtgcgttgcgccgctgtcgaccgcccacaacccggacacattcttgcccgtcgaaatgccacactccagtgagaccgcgaacgccactcgatcatagccgtagtcgtagttgtagctggcgtcgtcgttcctccactgggcattgttggccccgcgtccacggccattgccattgccgccgcgtcttgggccccgattctcgtccttctgcttggtccagcacttgtcaatcgtgtgccccaatttcccgcagtacgtacactggcgagactctcggtcggtgttgaacgccttggccgcattctccgtcttcaccgtcgccgtcttctcgccttgtctcttgatgtgctcattcgtcagcaccttcacgacgtcttgcgatcgtagttcagcgctgctcatctccaagttcagcacgacgttctcgtagctcttggggaggctgcgcaacaggcagatcgccacgtcctcatcctccatcttggcgccgatgctgctgagcttggcgctgatgttgaggacctcgttgcaatgatgcaagacgttgccgccttccgacatctccatgctgaagagttggcgcttcaggtagatgcgtccagccttctgcgaaccaccgtacagcgtcttcaggcgcgtccacgcaacccacgcttcctcgcagtcgtcgaccacatggtggtagtccgcgtccatgtggagcaacatcagtccgaacgcgatgttgctcgacttgacgtagtcgtccttggcccgcgagtccgtgaagctcggcgtcgtctcgcggttcacgacatgccacgtcgacttggtcaggaacacgccacgcatgtagcggttccacgtcgcgtagttgtccccgttgaacttgtcaatggagaccttggtcgaggcgtcttgggcagaggacatggtgtttgggctcataacctgatggaaggtatggatcttggacacgaagctcggacgaagcggagggagggacgtcgcagacggcgggaccggagcgaaggcacttgaggggtagaatgaagattcgaaaggtgattgaattgttggagcttacaccctactgttatagacacgcgaccctgcgtcctatcacctagtgcatctaatcaaccatcactcaccggtgttcatccaatcatcctactcgtctaatcatcggtggcgtaaacaacttaccgtaatcaccataatcaacgtgggttcggattggaccggttcgggttaaccggttaatgggtacaactggtacacagtacccaagaccagcaaccctcaatacagacgatcgccgaatcttacgaagagtgtgtgttccggcgatttggtgctagcgaggtgatcaggcacgatcgagagccgggatttatggctgacttcttccgcgcctttaacaagatcctgggtatgcgcctgcgagcgacgatggcatatcgacctcaggctaacggtaccgcagagcgaatggtacagacggcgacgagagccctgaagatgttcgtggaggatctggatcagagggattgggatgagtacgcagagcgattgaccttcgcgatcaacacggctcaagatcgggtccgtggggactcccctttttatctggtgcatggatgggatcctcgatcgacgctcgaggcaacgatacctttgggtagtacccggactcgggatcgggatcctcgacggtggcgttatcggatccagaagcactacgatcaggctcgaagtcaggtgaatgctcgactacgcgaggcgattgcggatcgggccgatcgacacaatgaagaagttcgaccgcactcgatcgaagctggatctcaggtgtggctgtacctggatcgtgtgaaagaggggtatgcccggaagctggctcacctgtggcacggcccgttccgtgtggcggagaaggtgaacgagtacatgatgaagcttccgatcgctggtacggactatcacctatccccgatcgcgcatgtttcgaagctgaagttggtcagggacttccccgatcgaccgcagatcgcactcacggtggacgaagcagatcgactcgatttcgacgaagtcttacttccggaggacagctgggccccagatcgagactcgaacgagtacgaagtggagaagatcacggatacgagaacaggtcgcaggactcggtatggccggacgtatcgagagttcctggtacactggaagagttatgacgagcctgactgggtcgacgaggctgatctcaactgtggagctttgttgcacctgttccttcgagatcgcgtgaaccggaaccgatttggcgcgatgcagtctcacgaagaagagtgagatcggaccgccagggcgagctggtcgccttggtgagtgacggatcgacggggaggccgttgatcggaggaaggggttttatattcgatatgattgtgtgcatatgaatgcagatcggatgattatggaacaactacaaggcgctacgacgacggatctgggctgatcgggttggtggcgaaaggtggtatgacgatggatctggactgatcgggttggtgacgacggattgacttgagagaggtgaccaacagtgacgaagattactgtggtgtttattgatccgagactttcatgctacgaagatgcgcgatcggcctccaaaaatcgaagatttcacgacagacgagctgaccagctggacgctgaattcgatcatccgagctgggggatgctgttgttgctgcagacactctgtactggggataagttcgttgaggagacacgcgatcggctgttccaggtgatcctggggcggtagcaacctttgggtcctgccagtgatcgtcggtgcccgcctcgatcaagcggagcaataggtttcacgacgaagtgtgagccgttgatactgggatggtgaagtcttgtccgcagtgagccgccgtgcggcccgacttacggacagggggcggttgtggtgaagcaccgaacaagaatttccaactgcgatgacatcaagcgacatggtggcagaacgataggcagggatcaggctgcggtcgcggatcaagagggtctatcgagagatctcaagcgattggataacgtcgacgcgtaaggcaacacatatgtcaagacagattacgggcgatcgcgcttggactgcggcgtgattcgacgtagacccaagcccggatcgacgaccaatctcgcagatctagggcggccgaggacagaagaggacggatcggcagcgcacggcaactcgcacaggtcatcgatcgggagttgatcgccgatcgccgatcgggatcgatcgtggatcaggaggcgatcgtggatcggggtcgatcgtggattgggagccgatcgtggatcgccgatcgacccggatgggaagcacatgggggcgaagccagggcaagaatccagtaatcgtttggttgtaggatggtagatgagatggcagcggtagagagagagaccagctaaacataaatcagaacgcaatttgcacagaagaccacaagtgccctcaagtcgtcaagtcccaagagctacattggcctcggcaagcgttgacacttcgggtagtgaactagcggtacggttaagactggattaatacattggccagcttgacctactctagtgatctttctctcgtgtgcaagtcctcgatcgaccggatactgcttggccggcgatcgctgcgtctctcaatcgacctcgatcccgctataggaagcggcaagcaactcaggaaaggaaggaacacacccggaaaggcaactacaggccttggatctactccaggccgaccgatcgaagcgaagaaccctcgatcggagcgtatactcggacgcagagcgaagactagcgcgctgctccacaaactatccccgcgacacgccaagacactcgatcttcaccaagtgctgcatcttcggagccctgagagagtagatccagcccgccgacgggtacacaaggtgagaacaagttcagccgatcacggatcgttgggggaccccctccgttagtcggtgtctaggcgctggtgggaagctcgatcaggccttaaccagattttggccgatcccgctacaccacagacgcaatcttgacctcgatagccccatctgtgtaggcccggggccggccgcggttgcttggccgctgcacggcaatagtggcgcggccaccccacagcttgtgcactgtgttgcgatggcaactaaatcgtgctgcagcctccgagatggcccccgtggaagctttccacatgtggtcatgttagagaggaacagcacgatctccagcttcgtagcaagcgatagatattgagggttgctggtcttgggtactgtgtaccagttgtacccattaaccggttaacccgaaccggtccaatccgaacccacgttgattatggtgattacggtaagttgtttacgccaccgatgattagacgagtaggatgattggatgaacaccggtgagtgatggttgattagatgcactaggtgataggacgcagggtcgcgtgtctataacagtagggtgtaagctccaacaattcaatcactttcgaatcttcattctacccctcaagtgccttcgctccggtcccgccgtctgcgacgtccctccctccgcttcgtccgagcttcgtgtccaagatccataccttccatcaggttatgagcccaagcaccatgtcctctgcccaagacgcctcgaccaaggtctccattgacaagttcaacggggacaactacgcgacgtggaaccgctacatgcgtggcgtgttcctgaccaagtcgacgtggcatgtcgtgaaccgcgagacgacgccgagcttcacggactcgcgggccaaggacgactacgtcaagtcgagcaacatcgcgttcggactgatgttgctccacatggacgcggactaccaccatgtggtcgacgactgcgaggaagcgtgggttgcgtggacgcgcctgaagacgctgtacggtggttcgcagaaggctggacgcatctacctgaagcgccaactcttcagcatggagatgtcggaaggcggcaacgtcttgcatcattgcaacgaggtcctcaacatcagcgccaagctcagcagcatcggcgccaagatggaggatgaggatgtggcgatctgcctgttgcgcagcctccccaagagctacgagaacgtcgtgctgaacttggagatgagcagcgctgaactacgatcgcaagacgtcgtgaaggtgctgacgaatgagcacatcaagagacaaggcgagaagacggcgacggcgaagacggagaatgcggccaaggcgttcaacaccgaccgagagtctcgccagtgtacgtactgcgggaaattggggcacacgattgacaagtgctggaccaagcagaaggacgagaatcggggcccaagacgcggcggcaatggcaatggccatggacgcggggccaacaatgcccagtggaggaacgacgacgccagctacaactacgactacggctatgatcgagtggcgttcgcggtctcactggagtgtggcatttcgacgggcaagaatgtgtccgggttgtgggcggtcgacagcggcgcaacgcaccacatctgcaacgacaaggccaagttcgctcatttgattgagcggaatgaaggcgaactttcggtggccgacggcagcaaggcggccatcatgggtgtggggaccatcgtggaacgagtgcttctgcccaacggcgacgagcgcgacatcgagatcaagaacgcactgtacgtcccaagcatgagcaagaatctgctttcggtgccacagatcaacaagagtggtctgttccaagtcgtgttcgacagcaccaagatgcagattgcgcacaagggctccaagccagtggtggcgacggcaaacctcgtggatggactctactggctccagacgcctcagcgatcggcgaatgcggcgaccagtgggaagacggtcgacttacacgcgcgtatgggtcacgctccggtggaggtgcttcgcaagatggtcgacaacaacatgatcaaggacgcgaaggcaccttccaagtcgagtggaccaagcgtgtgtcgcggctgccagcaagggaaaatggtccagaagccgttcccaagcaaccgtgacaagcgccactacgacacgttcgagctgctccacttcgacgtgtgcggccccatggaagaagagtcactgggtggcagcaagtatctgctgctgatcgtggacgaagccagcggatgcatgaaggggttctgcctgcgtgccaagtcggagagcgaggactgcatcaagatgtacgtcacgaaggtgcagacgcagttcggcaagaaggtcaagtttgtgcggcacgacggagcccgtgagttcgcgaccaactcgctcaaggccttctacgaagtcgaaggcatcgagcagcaaaccacggttccgtacgcgcaccagaccaaccgcacggcagaacgcgccatccggaccatcgtcacgattggtcgcagcatgctgcatcacgccaagctggacaagagcttctgggctgaggcggccatgacagccatctacgtgaagaatcgtctgccatcacccaagatcgaacacaagactccgttcaagatcgtttacaagtccaagccgagtgtgaagcacatgcgtgtgttcggatgccagacgtacatcctgacgccgaaggaaagacggcgcaagtgggaccccaaggctcgcgccgggctgttcctcggctacgaagaagtgtccaaggcgtatcgagtttatgacatcgaggcggggcaggtggttatcagtcgcgatgtcaacttcgatgagtcgacctttggactttcgacgcatacttcggatgaagacgtcgatgatgctgtgctggacttggacgcgctggacctggacgacaacgatggaccgcgccaaacgagcttcaagcagacggggaagcgcaagtaccgaccgagtggcgacgacaacactgccagaagatcgcgccccgttcgccaccgagctggcttagaagaagcaagtgcgccggacgtatcctcctcgcgccgagccgaccccgacgacgaagaaaagtctggggaccaagatgaagacgacgactcgacgcctccagtgttttggcgtgccagtgccaacgctgtggaagcagcagccgatctatcggagccgacgacgttccaagaggctgtgaacggtcctgatcaagtgcactggcgcaaagcgatccgcgcggagctcaagtcgatgcgactgcgtggtgtgtttcgagctgccaagttgcctaacggacaacgcgccatcgataccaagtgggtgttcaagatcaagcgcaaagcggacggctcgatcgagaagtacaaggcgcgcctcgtggccaagggcttcaagcagaagtacggcattgactacactgagacgttctcgctcgtggtcaagtatgtgacgctgcgcatggtgatcgcgattgctaagtattttggctggcccctcgaccaactcgacgtggtgacagcattcctgtacgggataatgaaggaggtggtcttctgcgtggttccggaaggcgtcgaactggatggtgacttcgactgcctggaactggtgaaggccatctacggtctcaagcaagcttcgcgagtgtggaacgagaccttcgacgagttcgtgtgctccatcggcttccaagtgtcggccttcgatccgtgcctctacatcaaggtggtggacggtcactgcgtgcttgtactggtgtacgtggatgacgtactgattaccgggagttcgcccgagctgatcgcacgcacgaagaccgacctgaagacgcgcttcgagatgaccgacagcggcaagtgcgcgtttgttcttgggatcgagttggtggacggcccggacggcagcgtgaccatgtgccagcggcgatacgtggacgacatcctgaagcgcttcgccatggacgagtgcaaggccgtggtgagtccggtggacatgagcactcgactggttccaagcgacgcggcgaccaaggtgaacgctccgtttcgcgaagctgttggtgctctgatgcacctgatgaccgccacgcgcccagacatcgcgtacgccgttggctatgtatcgcgcttcatggagaacccccaagaggaacactgggttgcggtcaagcgtatctttcgctacctgcaaggcaccaagacgcatgggatctgcttcaagccgggcgacaagatcgactttcgtggctactcggacgcggactgggccggcgacctcgccgaccgcaagtccactccaggctacacgttcatgctcatgagtgcgcctgtgagctggggaagcaagaagcaatcaagtgtgtccctgtccacgaacgaagcggaatacatcgcgctcagtctggctatccaagaagacaagtggattcatcgcctgctatgcgagattctggcggccgctaatgagactggacccgaactcatgatccgcgaagacaaccagtcgtgcatcaagatgacgaagaacccagtgaaccacggtcgcgccaagcacatcgacatcaagtaccaccacatccgcgatgaagtcaagcgcggcgaagtcaagctccagtactgcgagacttctgtgatgctagcggacatcatgacgaaggcgcttgcgggaccacgccacacggatctgacggtggctctcggcattcgtgggacttcgcattgagggggcgtattgagggttgctggtcttgggtactgtgtaccagttgtacccattaaccggttaacccgaaccggtccaatccgaacccacgttgattatggtgattacggtaagttgtttacgccaccgatgattagacgagtaggatgattggatgaacaccggtgagtgatggttgattagatgcactaggtgataggacgcagggtcgcgtgtctataacagtagggtgtaagctccaacaattcaatcactttcgaatcttcattctacccctcaagtgccttcgctccggtcccgccgtctgcgacgtccctccctccgcttcgtccgagcttcgtgtccaagatccataccttccatcaatagatctttggcgttgggggtgcgcggcatcttgggggtccttggcagaaaattggtttgtgcgactgtgttttggcgcgagttgcgcaaggagctttggcgccaccagggctgcaaaaaattaatggctcagagccaacaaattaaaaaaatataattttgtcgaatcggaacgtaaaacaaaatatgtgttcacatcatagttgaagtggccattgtttttcggaccggaggtagtacatattactacactaccactctgtttcaaaaaagtttggacattgagttcttttgacgtaccctgccaagaattttagcccacatataacagcactttgtaaggacattgagctcagggggtctatccactacaccgcatcgctgcgcaagaacactcttaattgctaaccaagggcggtcaaagatcaccggatatgagggtccaactttgcaataccggtttggctcttcaaaatgtcggatccaatatttgaaagtaggcataactttagtaatgtttcaattttcttggtgcccaatccaattgtcatcaaactaggccaatcacaagcaaattgaaaagcaaataagctcattaatcacattttcattcgctgaaactaacaataatttcgaccagtcgtaaattgtattaggggtacataattcagcagcccaatttattattttaggtacctagccacccagccactgcgatatgctgcctcgctacatggcaacgactgtaatgggcccatctacataagtaggtagattgacagtacataaagtagttaagtcagtacacgactagcgtgtactgacggtcatcgtgattggccgaattgggggagtcagaccccatttcagccaatcagtcgttgacctgcatttgagtggctcacatgagaccaggggtagccgccctggcccttacataaaacagagttaattttacccaagcctgactgcttggtctcactaaatccgagtctaaactaagctttctcaccgctacgtgtaagctagtaacggacacacacctggcccgttacacctggtagtacttcgtagtccttccaacgaccaagaccaagatgagccaagtcctgacgtccggtcctttaggggcaaccctagagcacgctgccttcccccatctcacgcgcattgagtgggaagctctccatcgcctcgcggcggtgtccggagaggctgttgtcacttcgctgctgagctcagcgatgccggaacaacagcgccaagctgcccaagaattcatggaacgcgagctcgccgacgcgaatcggcgggtcacaactccctcgcgctcctccaggaacgatgtcgtcaaactggagacgtccacctactctggcgtgggcgacgatcggcttccactgaaccgctggttccgtgagatcgacatcgctatcgcctcgtgcatgatcgaagcgtcggcggccaaggtcaacttcctactctcccggttgtccgggaaggccaaggaatggaccctcggcaagctcgtcgtcgaccagaacgcgttccctactctggagtcgttccagagtgatctccggctcgcgttcgagccgccccaagacgagtcgcgcgttcgcgcggagttcttcgctctcaagcaaggcaagatgtccatgcgcgactacgtccagaagacacgacaccttgtgtcgtgcattgtcacccaccccattgacatggcatctcaggtgcatgtctttgtgtttgggacgcgcgaaggcatgacacggtactgtctcacgagaatcgaaccctcctcgctcgaggaggcatttgccctcgcgctccgcgaggactacgtggtggcgacatcgtacgcgcgcgctatgccggaagtttctcgggtgtccgcacccgagcccaatgagatcgacgcaattgaggcgtcgggtgatcgacggcgctcggcttatggtgggggaggatgtcggagcgctcgtcctctgacctgcttccgctgccggaagattggacatcgcgcagcagagtgccgcgcgccagctccggttctcgcgcacgtcgatgtcgatgctagcccgaccactcaacaaaaaaacggccgggccagtaggtgcggggcgccctactggttggaacgaaggtccgggtcctccggtggcaacccggccttctagccctcccgtgctctatgcacgttttaatgccaccactacgagcggcgactcgaggctgatcatcgtcagcctccatgtcgcctgcgtccgacgtccactgcgcgcactccttgactcaggagcgacgaacaacttctttcgcgcgtcgtgtctgtcggtgctccctgcgagcgttcgcgtccggaagggtccgggcgaggtggaggtcaagcttgtggatggcaaggcccatcgcgtcgcccgacgcgaggtgtcgctgccgtacacgttcgacggcttccgcagcaacgatgacttcctggtgattgagatgaattacggattcgactgcattctgggtatcccgtggcttgcacggtatcagccagagattgactggctggctcggtcggtcaagcttcgacgtggcttcgacgtacgtgaagtgttcacgcacctcttggtggctccaagagactggcctcacgttaccgtcgtggacgagacagccacaacgcaagttgtgcacagagcgagcgatggccctctcttcatggcctgcgccgtgctgttgaatgatgaggatgtccggatgacatcgtgtggtcgcgatgacggacgcgtggtcgagcgaggtgtgctcccacacaatgagaacaagtcgacggtcgagcatgggttcccatcgagctacaagtcggcggtcgagcatgggttcccgtcgagctacaagtcgacggtcgagcatgggttcccgtcgagcaagatgttgacggtcgagcgtgggttcccgtcgcacaatgagacggcagtcgagcatgagtcgctcccgcacaacgatgttgcggctgagagcgttgcggctgagagcgcgatgcagccgcgtaccgccggattggtcgagcgtggcctctcacacctagaggagggtgaatcatcgtcgagcgagagtgatgcgtcttcttcgagcacccgctcgaagcgaaagaagaagtccaagcgacgccgcctgaagccccgtcgagaaccgtccacgactgagaacccaccgaaggagtcggtgtgcgctctcgagtacgtggagtgcgctccacgacgatcgcgcgtcatcgaagtcgcgagtccgcctcgcgataccaacacaatcacgcgactcccaggactctcctggaagaacttcctgccagacctgaaggcaggcgagatcgagcaagtgtgtctgatcaccgaggcggtccaggtggatacgctgcacgcggtcaaggtggaggatgcgccgtcgaggcccaagcacgccgcgcccaagtcagcgcgcgaggagcgcttcgcggcacagtcctgggaagctctgcgtgagtccggtaaccccgtgtacgaaattgccctcgaatacacggacatcttccccgacaagatccccaatgagctcccggcggaccgaggcgtgcgccacgagatcgacctcgcgcctgggacgaagtactgtgtgacgcggcagtggccacttccacgtgaccaggtgaaggccatcgacgacttcttcgagagccgccgctgggcaggtcacgtgcgcgaaaacatctcgccacactccagcccgaccttttgcgtcaagaaggcaacgggcgggtggcgcattgttcacgcgtgcaataagttgaacgatgccaccatacccgcgcagacgccaatcccgcgcaaggacatagtgctggactctatggcgggaagcgtgatctacagcgccatcgatctgaccgatgggttctaccagatactcatgcgagagtgtgacaaacctctcacagcggtaagcactccgagcggcatgctctgggagtggctggcgatgccccaaggtctgaagaacgcgccggccacgtttaaccgcatggtctcccatgtgatgtgcccgctccgtgacttcgcaccgagctacttcgatgatatcttcgtgcacagtcgcgccgaaggtgacctcagcgctgtcgaagtccacctgaagcacctgaggcaagccttccaggtgatgagggagaacaagctctacgccaacttgaagaagtgcgtgttctgcgcaccggagatcccggtgttgggctgctacgtgagcaaggacggagtccgcgccgaccctgagaaggttgacttggccgacccccacgagtcccactgagcttcgtcagtggctgggcatgacgaactacttgcacaagtacaccaaggactacgcgaagttaatccagccactgccgtcgctgctgaagaaggacaccacgtggtcgtggcgagaagagcaccaagccgcatttgactcggtgaagaggagtctgtcatccgcccctgttttggtgctcgcggacaactcgaagccattccacgtcgtctgcgacgcgagcgactttgccatcgggtacgccctgatgcagttcgacgacgaggatcgtgagcgggtgatcagctaccagtcccgccagctcaagccggcggagaggaactacccagtccacgacaaggagctcctcgccatgcgccacgcattgatcaagttcagggtctacctgttcggagagcagacgtttgcggtctacaccgaccatgcatcgctgcggactgcgatgaaatccccgcatctgtcccagcgcatggcccgctggctgtctttcttctccgagtacaacttcgtggtgcgctacaagcctggcaagaacaatatcctcgtcgacgcgctgtctcggcgtccagactacgacccacgtgaaggcctcgagcgccaggcagctgacgaagatgatgaagacgcgtgtgcgacgtgtgtgatgtcggggttgaacctgacgagcgtcgcccccaagatgccgcttcgggacgggatcgccgcagcgtacgagcatgacgcgcagtacaccagcatcctggcccacctccgctctccaagcgaggcgacattgaaggctctgtcgcgctcgacccgcagccacgtcgagcgatatcggcttgatggctccctgctgacgtacaccatcgaccgattcgatgccccgagagtggtggtgccgaatgacgaagaccttcgcgcccgggtcatccatgagtaccacgatgctccgatcgggggtcacttgggacgcgaaaagaccttcgcgacggtggcgcgagacttcttctggccccacttgtacaagtgggtgcgcaagtgggtgcgcacttgcgagatctgccagcgagtaaagccctcgccgtcgtcacatgctccgctgcgtccccttccggtccccacggaggcctggcgccccgtctcgatggacttcgtcttcggtcttccacccgactcgaacgggcgcccgggagtcctcgttttcgtcgacaggttcagcaagatggtgcatctcgttccagtggctgccacggttactgcggaagagtccgcagaccactttgtcgacgccgtcttccgccttcatggtctgcccgattccatcgtctcggatcgggatccgaggttcacgtccgcgttttggacggagctgttcaagttgcttggaacgaagctggcgatgtccaccgcggctcacccggagacggatggacaaaccgaacgcgtcaaccgcgtcgtcgaagacgtgctccgcagctacgctacgtcattcccgagctggagcgctttcctgcccctgaccgagttcgctctgaacaacgccgatcactcgtcgacgggcatgactccgttcttcgtgaactccgcgcgtcacccgcgcgtacccgccatacttgccgtaggccaacccacggaggctcgtgtctctacgcttggtgggggaggagctaccgctgaagactcaccgccgaccgagacgccggcggagccgtcgccggtcaattcacaggcgtcacacgcttcccagtgaccgaatcaagcgcaaatgcagtgacatgatcccaagtgaagaaggcccttaccgcaccgcatcgtgcggtgacgccgctcgcagactggacagagcgaactctgatcgaccccgctggcgctccagcgacgatgcagcaaccagctacggccgccaactatgcaccgaagtcctcggcgagtcccacggatcacttagcggtttccgagtttgtgcagcagcgtcaagcaatcacacgtttcgtgcgagacgcactgcaagccgcagtggacaggcagaaggagaatgcagacaagcgtggacgcaagaacaagacttcatttcgcacgggtgaccgtgtgttactgtctaccgaaggcatccgctcctccgccgtgaccaacctcggtgccaacaagttcgcgccgcgcttcatcggcccgttcaaggtgatcaaggtcctcggcgacgcgtacacactggacatcccgtcgtcgctgcgtcttcacccggctttctacgtcgggcgcctcaagcgatatcatcctgccgatattcctacctctgatcaccaggattcactggcgggtaatgtacccgaggctactcgcgacgccaacacccatcacccaagcctgtaccgtcgcgatggtcctcctccgattgtcgactcggcgggtgaagcgcgctggattgtggaccgcatcgttcacaacgaggacccatctcgtgcaaacgggcgtgggcgtaatccagtccgagctcctcgtgcgatctcagccgcgcgacgttaccgagtacgctggcttgggtttccacctgacgaggacacgtgggagacgcgtgcagctcttcttcgggatgtccccgatgttgttcgtgactatgaggcgaaggccgctgctgctgaagagaccacggagctccccgcggaagctaaagccttaagtgagcgtgatgatggaagtggacccccaccgcaagctcgcggtggcgttcaccgcgaagactaagaagaaaacccggcgacgactgccggactcgaaccggtgacctccgccttggtggcgcagcgttcgaccactgcgctagctggacttccgagtccccacgacgacgcgcgcgacctcatcaagcttggtgcgattgcgcatggcaagtggcaagaaggattcgcgtggggatcgagcccacgcgtcacagctcagcacggtgagcgcttgcccacttcgccgctccactgatgatcgctggtgtcgaagatgtccaagctggtctcgctgcgacgtcggttcgagtcgacgcttacgcgactcttcgtcgggagttacttcgaagggtcgtctcgaagagtcgcgccgcgctgatcgccatcctgtgtctcgacactcaccgggtctccgctccgtgcgcatcacacttgcgcttgtcgtcaagcgttggagtcgcttcccacgtcccttcgggggtccgtggatgtccgcagccacttggggcgctgcgcgttgcttcggcgtgtgcgccgacgagatgtcttggtgtgtgtaagctgctgcgcctgcgccgtcctgtgtcgctcggtagcacgagcgccgtccctccgccgcctcggtcgtccatggtgttcttcgggtgttctttcggaaatgtgtcttttgcacttacgttgcgtaagcgcaactttgagagggggggtgatgtaatgggcccatttacataagtaggtagattgacagtacataaagtagttaagtcagtacacggctagcgtgtactgacggtcatcgtgattggccgaattgggggagccagaccccatttcagccaatcaggcgttgacctgcatttgagtggctcacatgagaccaggggtagccgccctggtccttacataaaacagagttgattttacccaagcctgactgcttggtctcactaaagccgagtctaaactaagcttcctcaccgctacgtgtaagctagaaacggacacacacctggcccgttacaacgaccgaagatcctcgccagctttacgtcgcttctctttcttgatgtggggtatctggaactggttccctccttcatcttctaggcatttttccatgaccgacattagcgttaaaaacgcgttgtcaagtgttttccgacgtagtttcttgaaggcatcttcaacggcttcgacaatgctggtgactgtgttcatccgcctcgtttgttgcagcgtttgcagcgctgaaaacagcgacaaatccagtacgttgaagtctggactttgtgctggctgcgagatgagcgaaatgttccagccgtcgctgcaacacgccgcagtgacgactggatcatcgacaaaacagtgcggactggtgttatcttgttgaatgaacagtttcttgctacctgtaatatgaaccggagacacataagttaacaacctaatacacagataatgtcaatcgattaaaaatgagcagttacctgtccaaacacgcttaattgatggaatgacgtcatcaacaagcttgcggcgtacttgatcgcgcgtaacatttgcaggtacggtcagtagcgttcccctcgctcgcaatttcgacttgcgctgcgcctctcgtgactgtacaaacggctataggccaatcttcctattgaaccattgatttttggaggagctgtagcgcggccgagctacagcgacgaggaacatgaccttgagcaagtggcgctttcttctaaagactcgctgagctaccttctcattatgcgtgatgtagaaccgcttacgttcaaaatcaatgaaaaccatttttcatcaatgtggacgtagtcgtagaaaatatggaagcgtagaggcatttctggcataatataaataaaaatcattgttagataaatattctcatacatataattaatgaaatcagtcacctggtccgacaaaccgcatcacccagtccaggcgcttctgcttgtgtgctggtgtgagcagcggcttgattcgcgaactaacttgacggagtgatccagccttcacaaggcgccacagcgttgttgtcgcgaggccaatgctggccgcagttgcgcgaagagactggtgtggtgtagtagcacgcacaaaatcgtcagatgtggcaccctagctacaaacacaacaacagccgagctagtcggcccttgttggcctgcgctgagatgtcccccagcggttcggcccttccgggacagtgatgtctcgtcctcgccgagaccaagtaccccaagccagtcaatcacggaagccagctgagttacctgactccggaattagaaatcccgtgccctccgccaaaggacggacgacggccctcgcgggattttacgggtcgccgagagcaaaggcttctcgactcagcaatcagtgcccgggatgtacgggaacaccggctcgcagcggtggcgagacttttccttcgcgcttggcgagacacgcgcccaacccgggccgaccttaatctcttggcgctaccagtcaacaccctacaagctatgcctctcgggtgctgacagcagacataatccggcccgtgcaggggcttactggaagcgcgtgcacgtgttgtggacctagaaaattctgctctgtttggttgttatctnnnnnnnnnnnnnnnnnnnnnnnnnnnnnnnnnnnnnnnnnnnnnnnnnnnnnnnnnnnnnnnnnnnnnnnnnnnnnnnnnnnnnnnnnnnnnnnnnnnnnnnnnnnnnnnnnnnnnnnnnnnnnnnnnnnnnnnnnnnnnnnnnnnnnnnnnnnnnnnnnnnnnnnnnnnnnnnnnnnnnnnnnnnnnnnnnnnnnnnnnnnnnnnnnnnnnnnnnnnnnnnnnnnnnnnnnnnnnnnnnnnnnnnnnnnnnnnnnnnnnnnnnnnnnnnnnnnnnnnnnnnnnnnnnnnnnnnnnnnnnnnnnnnnnnnnnnnnnnnnnnnnnnnnnnnnnnnnnnnnnnnnnnnnnnnnnnnnnnnnnnnnnnnnnnnnnnnnnnnnnnnnnnnnnnnnnnnnnnnnnnnnnnnnnnnnnnnnnnnnnnnnnnnnnnnnnnnnnnnnnnnnnnnnnnnnnnnnnnnnnnnnnnnnnnnnnnnnnnnnnnnnnnnnnnnnnnnnnnnnnnnnnnnnnnnnnnnnnnnnnnnnnnnnnnnnnnnnnnnnnnnnnnnnnnnnnnnnnnnnnnnnnnnnnnnnnnnnnnnnnnnnnnnnnnnnnnnnnnnnnnnnnnnnnnnnnnnnnnnnnnnnnnnnnnnnnnnnnnnnnnnnnnnnnnnnnnnnnnnnnnnnnnnnnnnnnnnnnnnnnnnnnnnnnnnnnnnnnnnnnnnnnnnnnnnnnnnnnnnnnnnnnnnnnnnnnnnnnnnnnnnnnnnnnnnnnnnnnnnnnnnnnnnnnnnnnnnnnnnnnnnnnnnnnnnnnnnnnnnnnnnnnnnnnnnnnnnnnnnnnnnnnnnnnnnnnnnnnnnnnnnnnnnnnnnnnnnnnnnnnnnnnnnnnnnnnnnnnnnnnnnnnnnnnnnnnnnnnnnnnnnnnnnnnnnnnnnnnnnnnnnnnnnnnnnnnnnnnnnnnnnnnnnnnnnnnnnnnnnnnnnnnnnnnnnnnnnnnnnnnnnnnnnttggatctcggccgacccttcgctgagcgcagcgacgcttgagctcggctggtccggataaggcgtccggataactcttcgaactcggctgagccggataaagtgtccggataagccggtgaactcggttgagccggataacccagtgaactcggcggagcgacccgcgaactcggcggagcgacccgtgaactcgactgcgcgacttccggactcaattgagcctggttaccgtatcggacggtacatggtaccgtttagccgagctcggcggcttgaaatccccatgatctcggctgagtgtgtccagtgccttcctgaactcggctgggtcttcatcactgggcctgccacgtgtccccaggtcgaagccggtgtgccttgagtttctgacaccatcagccgagttaagcggtcgtccaccagcgcattcttgcccactgagctcggcatcccgccgagtagtacttggctcctggtacgttgttccactgcggccgtggagtgtgacacaaaacttgatgttccctacaccacaactgccccgtccatgcaaggagccggagtggtgagtggcctggccactggatgtgtcgcacgcttgatttcgtccaatccgatctgtcgcaaacactctgagttcacatttcccgaattcgagtggagagaaacgcccgcaacgccagctcgacgccctcgttccgtgaaggtgagacttgcttgagccttgatcgttggtataggccttgtctgatgcgtggactccgcgcctcatgggtctgtacacatgtagatgcccnnnnnnnnnnnnnnnnnnnnnnnnnnnnnnnnnnnnnnnnnnnnnnnnnnnnnnnnnnnnnnnnnnnnnnnnnnnnnnnnnnnnnnnnnnnnnnnnnnnnnnnnnnnnnnnnnnnnnnnnnnnnnnnnnnnnnnnnnnnnnnnnnnnnnnnnnnnnnnnnnnnnnnnnnnnnnnnnnnnnnnnnnnnnnnnnnnnnnnnnnnnnnnnnnnnnnnnnnnnnnnnnnnnnnnnnnnnnnnnnnnnnnnnnnnnnnnnnnnnnnnnnnnnnnnnnnnnnnnnnnnnnnnnnnnnnnnnnnnnnnnnnnnnnnnnnnnnnnnnnnnnnnnnnnnnnnnnnnnnnnnnnnnnnnnnnnnnnnnnnnnnnnnnnnnnnnnnnnnnnnnnnnnnnnnnnnnnnnnnnnnnnnnnnnnnnnnnnnnnnnnnnnnnnnnnnnnnnnnnnnnnnnnnnnnnnnnnnnnnnnnnnnnnnnnnnnnnnnnnnnnnnnnnnnnnnnnnnnnnnnnnnnnnnnnnnnnnnnnnnnnnnnnnnnnnnnnnnnnnnnnnnnnnnnnnnnnnnnnnnnnnnnnnnnnnnnnnnnnnnnnnnnnnnnnnnnnnnnnnnnnnnnnnnnnnnnnnnnnnnnnnnnnnnnnnnnnnnnnnnnnnnnnnnnnnnnnnnnnnnnnnnnnnnnnnnnnnnnnnnnnnnnnnnnnnnnnnnnnnnnnnnnnnnnnnnnnnnnnnnnnnnnnnnnnnnnnnnnnnnnnnnnnnnnnnnnnnnnnnnnnnnnnnnnnnnnnnnnnnnnnnnnnnnnnnnnnnnnnnnnnnnnnnnnnnnnnnnnnnnnnnnnnnnnnnnnnnnnnnnnnnnnnnnnnnnnnnnnnnnnnnnnnnnnnnnnnnnnnnnnnnnnnnnnnnnnnnnnnnnnnnnnnnnnnnnnnnnnnnnnnnnnnnnnnnnnnnnnnnnnnnnnnnnnnnnnnnnnnnnnnnnnnnnnnnnnnnnnnnnnnnnnnnnnnnnnnnnnnnnnnnnnnnnnnnnnnnnnnnnnnnnnnnnnnnnnnnnnnnnnnnnnnnnnnnnnnnnnnnnnnnnnnnnnnnnnnnnnnnnnnnnnnnnnnnnnnnnnnnnnnnnnnnnnnnnnnnnnnnnnnnnnnnnnnnnnnnnnnnnnnnnnnnnnnnnnnnnnnnnnnnnnnnnnnnnnnnnnnnnnnnnnnnnnnnnnnnnnnnnnnnnnnnnnnnnnnnnnnnnnnnnnnnnnnnnnnnnnnnnnnnnnnnnnnnnnnnnnnnnnnnnnnnnnnnnnnnnnnnnnnnnnnnnnnnnnnnnnnnnnnnnnnnnnnnnnnnnnnnnnnnnnnnnnnnnnnnnnnnnnnnnnnnnnnnnnnnnnnnnnnnnnnnnnnnnnnnnnnnnnnnnnnnnnnnnnnnnnnnnnnnnnnnnnnnnnnnnnnnnnnnnnnnnnnnnnnnnnnnnnnnnnnnnnnnnnnnnnnnnnnnnnnnnnnnnnnnnnnnnnnnnnnnnnnnnnnnnnnnnnnnnnnnnnnnnnnnnnnnnnnnnnnnnnnnnnnnnnnnnnnnnnnnnnnnnnnnnnnnnnnnnnnnnnnnnnnnnnnnnnnnnnnnnnnnnnnnnnnnnnnnnnnnnnnnnnnnnnnnnnnnnnnnnnnnnnnnnnnnnnnnnnnnnnnnnnnnnnnnnnnnnnnnnnnnnnnnnnnnnnnnnnnnnnnnnnnnnnnnnnnnnnnnnnnnnnnnnnnnnnnnnnnnnnnnnnnnnnnnnnnnnnnnnnnnnnnnnnnnnnnnnnnnnnnnnnnnnnnnnnnnnnnnnnnnnnnnnnnnnnnnnnnnnnnnnnnnnnnnnnnnnnnnnnnnnnnnnnnnnnnnnnnnnnnnnnnnnnnnnnnnnnnnnnnnnnnnnnnnnnnnnnnnnnnnnnnnnnnnnnnnnnnnnnnnnnnnnnnnnnnnnnnnnnnnnnnnnnnnnnnnnnnnnnnnnnnnnnnnnnnnnnnnnnnnnnnnnnnnnnnnnnnnnnnnnnnnnnnnnnnnnnnnnnnnnnnnnnnnnnnnnnnnnnnnnnnnnnnnnnnnnnnnnnnnnnnnnnnnnnnnnnnnnnnnnnnnnnnnnnnnnnnnnnnnnnnnnnnnnnnnnnnnnnnnnnnnnnnnnnnnnnnnnnnnnnnnnnnnnnnnnnnnnnnnnnnnnnnnnnnnnnnnnnnnnnnnnnnnnnnnnnnnnnnnnnnnnnnnnnnnnnnnnnnnnnnnnnnnnnnnnnnnnnnnnnnnnnnnnnnnnnnnnnnnnnnnnnnnnnnnnnnnnnnnnnnnnnnnnnnnnnnnnnnnnnnnnnnnnnnnnnnnnnnnnnnnnnnnnnnnnnnnnnnnnnnnnnnnnnnnnnnnnnnnnnnnnnnnnnnnnnnnnnnnnnnnnnnnnnnnnnnnnnnnnnnnnnnnnnnnnnnnnnnnnnnnnnnnnnnnnnnnnnnnnnnnnnnnnnnnnnnnnnnnnnnnnnnnnnnnnnnnnnnnnnnnnnnnnnnnnnnnnnnnnnnnnnnnnnnnnnnnnnnnnnnnnnnnnnnnnnnnnnnnnnnnnnnnnnnnnnnnnnnnnnnnnnnnnnnnnnnnnnnnnnnnnnnnnnnnnnnnnnnnnnnnnnnnnnnnnnnnnnnnnnnnnnnnnnnnnnnnnnnnnnnnnnnnnnnnnnnnnnnnnnnnnnnnnnnnnnnnnnnnnnnnnnnnnnnnnnnnnnnnnnnnnnnnnnnnnnnnnnnnnnnnnnnnnnnnnnnnnnnnnnnnnnnnnnnnnnnnnnnnnnnnnnnnnnnnnnnnnnnnnnnnnnnnnnnnnnnnnnnnnnnnnnnnnnnnnnnnnnnnnnnnnnnnnnnnnnnnnnnnnnnnnnnnnnnnnnnnnnnnnnnnnnnnnnnnnnnnnnnnnnnnnnnnnnnnnnnnnnnnnnnnnnnnnnnnnnnnnnnnnnnnnnnnnnnnnnnnnnnnnnnnnnnnnnnnnnnnnnnnnnnnnnnnnnnnnnnnnnnnnnnnnnnnnnnnnnnnnnnnnnnnnnnnnnnnnnnnnnnnnnnnnnnnnnnnnnnnnnnnnnnnnnnnnnnnnnnnnnnnnnnnnnnnnnnnnnnnnnnnnnnnnnnnnnnnnnnnnnnnnnnnnnnnnnnnnnnnnnnnnnnnnnnnnnnnnnnnnnnnnnnnnnnnnnnnnnnnnnnnnnnnnnnnnnnnnnnnnnnnnnnnnnnnnnnnnnnnnnnnnnnnnnnnnnnnnnnnnnnnnnnnnnnnnnnnnnnnnnnnnnnnnnnnnnnnnnnnnnnnnnnnnnnnnnnnnnnnnnnnnnnnnnnnnnnnnnnnnnnnnnnnnnnnnnnnnnnnnnnnnnnnnnnnnnnnnnnnnnnnnnnnnnnnnnnnnnnnnnnnnnnnnnnnnnnnnnnnnnnnnnnnnnnnnnnnnnnnnnnnnnnnnnnnnnnnnnnnnnnnnnnnnnnnnnnnnnnnnnnnnnnnnnnnnnnnnnnnnnnnnnnnnnnnnnnnnnnnnnnnnnnnnnnnnnnnnnnnnnnnnnnnnnnnnnnnnnnnnnnnnnnnnnnnnnnnnnnnnnnnnnnnnnnnnnnnnnnnnnnnnnnnnnnnnnnnnnnnnnnnnnnnnnnnnnnnnnnnnnnnnnnnnnnnnnnnnnnnnnnnnnnnnnnnnnnnnnnnnnnnnnnnnnnnnnnnnnnnnnnnnnnnnnnnnnnnnnnnnnnnnnnnnnnnnnnnnnnnnnnnnnnnnnnnnnnnnnnnnnnnnnnnnnnnnnnnnnnnnnnnnnnnnnnnnnnnnnnnnnnnnnnnnnnnnnnnnnnnnnnnnnnnnnnnnnnnnnnnnnnnnnnnnnnnnnnnnnnnnnnnnnnnnnnnnnnnnnnnnnnnnnnnnnnnnnnnnnnnnnnnnnnnnnnnnnnnnnnnnnnnnnnnnnnnnnnnnnnnnnnnnnnnnnnnnnnnnnnnnnnnnnnnnnnnnnnnnnnnnnnnnnnnnnnnnnnnnnnnnnnnnnnnnnnnnnnnnnnnnnnnnnnnnnnnnnnnnnnnnnnnnnnnnnnnnnnnnnnnnnnnnnnnnnnnnnnnnnnnnnnnnnnnnnnnnnnnnnnnnnnnnnnnnnnnnnnnnnnnnnnnnnnnnnnnnnnnnnnnnnnnnnnnnnnnnnnnnnnnnnnnnnnnnnnnnnnnnnnnnnnnnnnnnnnnnnnnnnnnnnnnnnnnnnnnnnnnnnnnnnnnnnnnnnnnnnnnnnnnnnnnnnnnnnnnnnnnnnnnnnnnnnnnnnnnnnnnnnnnnnnnnnnnnnnnnnnnnnnnnnnnnnnnnnnnnnnnnnnnnnnnnnnnnnnnnnnnnnnnnnnnnnnnnnnnnnnnnnnnnnnnnnnnnnnnnnnnnnnnnnnnnnnnnnnnnnnnnnnnnnnnnnnnnnnnnnnnnnnnnnnnnnnnnnnnnnnnnnnnnnnnnnnnnnnnnnnnnnnnnnnnnnnnnnnnnnnnnnnnnnnnnnnnnnnnnnnnnnnnnnnnnnnnnnnnnnnnnnnnnnnnnnnnnnnnnnnnnnnnnnnnnnnnnnnnnnnnnnnnnnnnnnnnnnnnnnnnnnnnnnnnnnnnnnnnnnnnnnnnnnnnnnnnnnnnnnnnnnnnnnnnnnnnnnnnnnnnnnnnnnnnnnnnnnnnnnnnnnnnnnnnnnnnnnnnnnnnnnnnnnnnnnnnnnnnnnnnnnnnnnnnnnnnnnnnnnnnnnnnnnnnnnnnnnnnnnnnnnnnnnnnnnnnnnnnnnnnnnnnnnnnnnnnnnnnnntgcgacgcgagcgactttgccatcgggtacgccctgatgcagttcgacgacgaggatcgtgagcgggtgatcagctaccagtcccgccagctcaagccggcggagaggaactacccagtccacgacaaggagctcctcgccatgcgccacgcattgatcaagttcagggtctacctgttcggagagcagacgtttgcggtctacaccgaccatgcatcgctgcggactgcgatgaaatccccgcatctgtcccagcgcatggcccgctggctgtctttcttctccgagtacaacttcgtggtgcgctacaagcctggcaagaacaatatcctcgtcgacgcgctgtctcggcgtccagactacgacccacgtgaaggcctcgagcgccaggcagctgacgaagatgatgaagacgcgtgtgcgacgtgtgtgatgtcggggttgaacctgacgagcgtcgcccccaagatgccgcttcgggacgggatcgccgcagcgtacgagcatgacgcgcagtacaccagcatcctggcccacctccgctctccaagcgaggcgacattgaaggctctgtcgcgctcgacccgcagccacgtcgagcgatatcggcttgatggctccctgctgacgtacaccatcgaccgattcgatgccccgagagtggtggtgccgaatgacgaagaccttcgcgcccgggtcatccatgagtaccacgatgctccgatcgggggtcacttgggacgcgaaaagaccttcgcgacggtggcgcgagacttcttctggccccacttgtacaagtgggtgcgcaagtgggtgcgcacttgcgagatctgccagcgagtaaagccctcgccgtcgtcacatgctccgctgcgtccccttccggtccccacggaggcctggcgccccgtctcgatggacttcgtcttcggtcttccacccgactcgaacgggcgcccgggagtcctcgttttcgtcgacaggttcagcaagatggtgcatctcgttccagtggctgccacggttactgcggaagagtccgcagaccactttgtcgacgccgtcttccgccttcatggtctgcccgattccatcgtctcggatcgggatccgaggttcacgtccgcgttttggacggagctgttcaagttgcttggaacgaagctggcgatgtccaccgcggctcacccggagacggatggacaaaccgaacgcgtcaaccgcgtcgtcgaagacgtgctccgcagctacgctacgtcattcccgagctggagcgctttcctgcccctgaccgagttcgctctgaacaacgccgatcactcgtcgacgggcatgactccgttcttcgtgaactccgcgcgtcacccgcgcgtacccgccatacttgccgtaggccaacccacggaggctcgtgtctctacgcttggtgggggaggagctaccgctgaagactcaccgccgaccgagacgccggcggagccgtcgccggtcaattcacaggcgtcacacgcttcccagtgaccgaatcaagcgcaaatgcagtgacatgatcccaagtgaagaaggcccttaccgcaccgcatcgtgcggtgacgccgctcgcagactggacagagcgaactctgatcgaccccgctggcgctccagcgacgatgcagcaaccagctacggccgccaactatgcaccgaagtcctcggcgagtcccacggatcacttagcggtttccgagtttgtgcagcagcgtcaagcaatcacacgtttcgtgcgagacgcactgcaagccgcagtggacaggcagaaggagaatgcagacaagcgtggacgcaagaacaagacttcatttcgcacgggtgaccgtgtgttactgtctaccgaaggcatccgctcctccgccgtgaccaacctcggtgccaacaagttcgcgccgcgcttcatcggcccgttcaaggtgatcaaggtcctcggcgacgcgtacacactggacatcccgtcgtcgctgcgtcttcacccggctttctacgtcgggcgcctcaagcgatatcatcctgccgatattcctacctctgatcaccaggattcactggcgggtaatgtacccgaggctactcgcgacgccaacacccatcacccaagcctgtaccgtcgcgatggtcctcctccgattgtcgactcggcgggtgaagcgcgctggattgtggaccgcatcgttcacaacgaggacccatctcgtgcaaacgggcgtgggcgtaatccagtccgagctcctcgtgcgatctcagccgcgcgacgttaccgagtacgctggcttgggtttccacctgacgaggacacgtgggagacgcgtgcagctcttcttcgggatgtccccgatgttgttcgtgactatgaggcgaaggccgctgctgctgaagagaccacggagctccccgcggaagctaaagccttaagtgagcgtgatgatggaagtggacccccaccgcaagctcgcggtggcgttcaccgcgaagactaagaagaaaacccggcgacgactgccggactcgaaccggtgacctccgccttggtggcgcagcgttcgaccactgcgctagctggacttccgagtccccacgacgacgcgcgcgacctcatcaagcttggtgcgattgcgcatggcaagtggcaagaaggattcgcgtggggatcgagcccacgcgtcacagctcagcacggtgagcgcttgcccacttcgccgctccactgatgatcgctggtgtcgaagatgtccaagctggtctcgctgcgacgtcggttcgagtcgacgcttacgcgactcttcgtcgggagttacttcgaagggtcgtctcgaagagtcgcgccgcgctgatcgccatcctgtgtctcgacactcaccgggtctccgctccgtgcgcatcacacttgcgcttgtcgtcaagcgttggagtcgcttcccacgtcccttcgggggtccgtggatgtccgcagccacttggggcgctgcgcgttgcttcggcgtgtgcgccgacgagatgtcttggtgtgtgtaagctgctgcgcctgcgccgtcctgtgtcgctcggtagcacgagcgccgtccctccgccgcctcggtcgtccatggtgttcttcgggtgttctttcggaaatgtgtcttttgcacttacgttgcgtaagcgcaactttgagagggggggtgatgtaatgggcccatttacataagtaggtagattgacagtacataaagtagttaagtcagtacacggctagcgtgtactgacggtcatcgtgattggccgaattgggggagccagaccccatttcagccaatcaggcgttgacctgcatttgagtggctcacatgagaccaggggtagccgccctggtccttacataaaacagagttgattttacccaagcctgactgcttggtctcactaaagccgagtctaaactaagcttcctcaccgctacgtgtaagctagaaacggacacacacctggcccgttacaacgaccgaagatcctcgccagctttacgtcgcttctctttcttgatgtggggtatctggaactggttccctccttcatcttctaggcatttttccatgaccgacattagcgttaaaaacgcgttgtcaagtgttttccgacgtagtttcttgaaggcatcttcaacggcttcgacaatgctggtgactgtgttcatccgcctcgtttgttgcagcgtttgcagcgctgaaaacagcgacaaatccagtacgttgaagtctggactttgtgctggctgcgagatgagcgaaatgttccagccgtcgctgcaacacgccgcagtgacgactggatcatcgacaaaacagtgcggactggtgttatcttgttgaatgaacagtttcttgctacctgtaatatgaaccggagacacataagttaacaacctaatacacagataatgtcaatcgattaaaaatgagcagttacctgtccaaacacgcttaattgatggaatgacgtcatcaacaagcttgcggcgtacttgatcgcgcgtaacatttgcaggtacggtcagtagcgttcccctcgctcgcaatttcgacttgcgctgcgcctctcgtgactgtacaaacggctataggccaatcttcctattgaaccattgatttttggaggagctgtagcgcggccgagctacagcgacgaggaacatgaccttgagcaagtggcgctttcttctaaagactcgctgagctaccttctcattatgcgtgatgtagaaccgcttacgttcaaaatcaatgaaaaccatttttcatcaatgtggacgtagtcgtagaaaatatggaagcgtagaggcatttctggcataatataaataaaaatcattgttagataaatattctcatacatataattaatgaaatcagtcacctggtccgacaaaccgcatcacccagtccaggcgcttctgcttgtgtgctggtgtgagcagcggcttgattcgcgaactaacttgacggagtgatccagccttcacaaggcgccacagcgttgttgtcgcgaggccaatgctggccgcagttgcgcgaagagactggtgtggtgtagtagcacgcacaaaatcgtcagatgtggcaccctagctacaaacacaacaacagccgagctagtcggcccttgttggcctgcgctgagatgtcccccagcggttcggcccttccgggacagtgatgtctcgtcctcgccgagaccaagtaccccaagccagtcaatcacggaagccagctgagttacctgactccggaattagaaatcccgtgccctccgccaaaggacggacgacggccctcgcgggattttacgggtcgccgagagcaaaggcttctcgactcagcaatcagtgcccgggatgtacgggaacaccggctcgcagcggtggcgagacttttccttcgcgcttggcgagacacgcgcccaacccgggccgaccttaatctcttggcgctaccagtcaacaccctacaagctatgcctctcgggtgctgacagcagacataatccggcccgtgcaggggcttactggaagcgcgtgcacgtgttgtggacctagaaaattctgctctgtttggttgttatctctgtcgggcgccctgaaggggcgcctctactattcctaagatcctatacaaataccaaatgaaagtgggtggttttggatctcggccgacccttcgctgagcgcagcgacgcttgagctcggctggtccggataaggcgtccggataactcttcgaactcggctgagccggataaagtgtccggataagccggtgaactcggttgagccggataacccagtgaactcggcggagcgacccgcgaactcggcggagcgacccgtgaactcgactgcgcgacttccggactcaattgagcctggttaccgtatcggacggtacatggtaccgtttagccgagctcggcggcttgaaatccccatgatctcggctgagtgtgtccagtgccttcctgaactcggctgggtcttcatcactgggcctgccacgtgtccccaggtcgaagccggtgtgccttgagtttctgacaccatcagccgagttaagcggtcgtccaccagcgcattcttgcccactgagctcggcatcccgccgagtagtacttggctcctggtacgttgttccactgcggccgtggagtgtgacacaaaacttgatgttccctacaccacaactgccccgtccatgcaaggagccggagtggtgagtggcctggccactggatgtgtcgcacgcttgatttcgtccaatccgatctgtcgcaaacactctgagttcacatttcccgaattcgagtggagagaaacgcccgcaacgccagctcgacgccctcgttccgtgaaggtgagacttgcttgagccttgatcgttggtataggccttgtctgatgcgtggactccgcgcctcatgggtctgtacacatgtagatgcccctatcgctcgcaccaaaccccgtcgtcggatcacttcagcagcgaatcagcctggatggtcgtctcggcgtggcaaccggtagcaggaactgaaccatacgaagtcagctggtgcccctgtcgacgctcggagtactagcggtgatgttgggcctgccgcagcaaagcgagtaggtgatgcaggtgtcggggaagtgctcgattggctgcaataccgacgaagccgagcatcgctgtctccgtcaaaatgagcagccatggatgctgccagcgactcggctgaccaggtaagcacgttcctctcgtttcggtgcgtcgagtgaagcctgatagttgtcttggcatgctacaaggcaccgggaactcggcaggtcaagaaacgcttccccgatcgggccgcgctgagctcgaaatccaacccagctgagcttattggcgagaagtgcagcagcaagttgaactcagctttgtccgaactcggctgtcctgacgactagctgctatccgctgaccttgaactcggctggacttgaacacagcctccgcttcatcgactcaactagcctggtaagtgtttgccccactcactttcgtgcgttgagttagctctcaccgttgctgtgtcattttataaacgaacaaggcgatcccgatgcgtttgatgctccagtcgagttatcctgaacgggccgagctgggttcattggtcaacggaccttgacttcagcatgtctccagctctgttagaccagcttaccccgactgggctcagcttggttgggaaggtggtaggcaagctcgactggaacagcacttcattcggtcacattccaactcggctcgccgcgagctcggctgcgttcaaactcagtttgaattcggtatcttcggttcagctgtgaagcgtgttcagactcagctcggctacacctcgaactcggcatgagcgctctccaatcggaacatggtgcgtttaccagcactcaactcggcgaacttccgaacgcgatctcactgaaactcggcgtaccgcaactcagcccagtgtttccttccgttgaagtgagtacacttcagattggcgccatccaacccgcggcactgctggaactcggcatcccattccagcttgatcgcactccaatgttctcggcttcgcagcaacccagtgcgaacgcgacctcattcggacgcagcgtgatttcggtctcgcttcagctcagctctgctcggactcggctgcgcataacgtcggctcgacctacgtcgtctcgacctacgtcgtctcgacctacgtcgtctcggctggaatccgacgagaaccgggcgcaagaccgagatgtatgcgttcccactggaactggacgcgaggcggctcaacttgatcgtggctttgcttcagcaaggttgctcttcaatcggctccactccaacgaccagcgcttcttcgaagcgttgctcgaactcggctccgttacggcttggttgaactcggcttcacgacatctcggtgtcaaactacttccacgcagagtgcactgtctcgcttcaactcggctctgcttgaacgcatctcggcttcagcttgactgtggttcaactcagttggtgctgacctgggctgcacttgtacctgatcccgattcagctcggattcaagacaaacctctgctgcaattcgcctaggcgccacttgatccccatgttctgtggctctgccacgaatcaacccgggtctagcgcgactcatgttcacctggaattgattccgcttcagcttagcccagttgagcaaggtgagaggcaagctcgactgagcgaacgacacagctggctgcctgaccagctctgtcccttagcggaagtatcagcgctttgaaggggtgtttcgacttggctatgctcgacccctgaccaagctctgctcatgttggctcaatgtgaataggaccgcggccgcgtggaatccattcctcttcagtccagctttggatgttgggtacacctttgcgacgccgtgactcggcgatttcaccgactcggctttaggctgaccgcagataaacgcgatggtagccctacgtcggatcgagtgaagtcggagttcatcttcaaagcaggtgtctgcttctgctcagctacggaccatctcggctcccgttcgagatcgctggcacgtcgacattctcggcgacgcgcctgcccagcgtgcctccgctgagctttgctcaactccagctttgctgcaacttcggtttgttcaccgccgccgcgcatcgaccgactcggctagccgcctcttggtaaacatggagtgattatggcctcactggaacatcgtgcgaactcgacttcgcttcggctttcctgcttgagcgtggctccagatcagcacagctccgcgtcagcacacctgcgctccaattcagcttgtgcgcgcaacgggaagatcgttcattgacttggtcggaggtcccggcggtcgtacccaagggtgtcgatcgtaccgccgcatatcacacacagtgccccagtgggtagcgtgttcacggacccagtgacgagtcaacacagcttcggcatcgacggctgactcgctcaatctgtgcagacgcaccatcacctccctcagcttcttcactgggtcgttgtcagaccagctgggcttaaccgctcagctcggcaactcggctgagacttcgcgccgactccaacgctaacccggcgaatgggcttcttgctttccagctccatcttcgctcactccatttcgatatcatgtaattcatataatccatacagttgacgcagtatcattcttcgactcgacccagcctgctgtcttcactgagtcggcggatcatcactttggtgcaatagccttagaccgcatctgcaacttgcaccatttgcagacgggtttcacatttcttcgattgcccctagtcgagtggaaaggtttcccacgagacgttcggcatcgaatcccaactcgggcatttcgcgctggatgccctcgtcgctcgttgtatcaggggcggacggtcccctggagcgacggcttgactgtcgtcgtccgcatcgtcaccgagcttggctgcgaggttttgttgggctcgtcgaggtttctccatgcgcccaacatgcagcgagaactcagctaccccgctgagcaactcggctttcttcaattcttcatcataatctccgatatttccatctcttcctcggtcttgggtgcggtcgtcgccaaaccgaacggttgggaccgcttccatcgtcatgtcggcggtccttccgccagatgagttcggcatcgtgtgaaacgaacccccagccgtcgctgggctggcccagctcggcaaagatctccccttgaccatcttgctcggtactcgaaacttggttgacttggtaccaacgaaaacaaaccaccctgctcccgggtcgcggcaccagttgtggtgtagtagcacgcacaaaatcgtcagatgtggcaccctagctacaaacacaacaacagccgagctagtcggcccttgttggcctgcgctgagatgtcccccagcggttcggcccttccgggacagtgatgtctcgtcctcgccgagaccaagtaccccaagccagtcaatcacggaagccagctgagttacctgactccggaattagaaatcccgtgccctccgccaaaggacggacgacggccctcgcgggattttacgggtcgccgagagcaaaggcttctcgactcagcaatcagtgcccgggatgtacgggaacaccggctcgcagcggtggcgagacttttccttcgcgcttggcgagacacgcgcccaacccgggccgaccttaatctcttggcgctaccagtcaacaccctacaagctatgcctctcgggtgctgacagcagacataatccggcccgtgcaggggcttactggaagcgcgtgcacgtgttgtggacctagaaaattctgctctgtttggttgttatctctgtcgggcgccctgaaggggcgcctctactattcctaagatcctatacaaataccaaatgaaagtgggtggttttggatctcggccgacccttcgctgagcgcagcgacgcttgagctcggctggtccggataaggcgtccggataactcttcgaactcggctgagccggataaagtgtccggataagccggtgaactcggttgagccggataacccagtgaactcggcggagcgacccgcgaactcggcggagcgacccgtgaactcgactgcgcgacttccggactcaattgagcctggttaccgtatcggacggtacatggtaccgtttagccgagctcggcggcttgaaatccccatgatctcggctgagtgtgtccagtgccttcctgaactcggctgggtcttcatcactgggcctgccacgtgtccccaggtcgaagccggtgtgccttgagtttctgacaccatcagccgagttaagcggtcgtccaccagcgcattcttgcccactgagctcggcatcccgccgagtagtacttggctcctggtacgttgttccactgcggccgtggagtgtgacacaaaacttgatgatccgtacaccacattggcgctgcatgagtggcacagcctccaccttctgctcgacatcagtaagcgtaaacttctttttcctatccactgtggcgtagcgggatcagcaaaatccgcgagattgccaatccaacttaccaactgcgcccgaacaccgacttacggagggggtcccccgatgatccgtgatctgtgtgctgaactggtcaccttgtgtacccgtcggtagggctggatctgctcctctggtgtctgctgaagcgtccgagccttgaagagagaacagtctgggcgagacgcggggatgtgggtggagcagcgcggaaaccttcactctgctcgcagtagttattcccaatccagtgatagtcgacttggatcgggcgacctggatctggatccggccgtggggttgcctttgggttgttgttgttcctttcctttgcctttgtaggtcttccttttccgtacttgccgcttcctatagcgggatccgtagatgttgagagttgaggatgcacccggccaagtagtaactccgggtggatcgggatctgcacttgcgaatgaaagaagctccttgcgccgctaaaatttgcgctctactgacccaaacgcgtgccagtagctactcatagaacgaaacagctgaacccatagcctatggctccttagtgccctctaaagtatcttcagtgctcaataaaacactccagcactcatcagtaagataacggaccccaaaccgaattagttttaaattacggaccacaaaacggatttcccctaacccgtcttgctaggacaaacgggaggacaaaatcggtttttacttgatttcagtattgtgtaccacaaattttgtcctagacggaccgccaggacaaaaactatggtacactatactttacttccgtgaatttcggatttgtcctatattgtgccttgcatgctttctgtctaaacaacgacgtaattcgttgttttagcaaatcacggtgattagcccatcataaagttagcagactaactcgtcaatttaagatagaatagctgctaaaacaacgagttaacgttgagttatgctcactttcgttgaatggctggagtaaatccgacaatactacggccctgacattctaattctagctcgctcgctttgtctgattgctttctagtcgatgattgacatgcgttggcgatctatcgtactaaactacgtctacgatattgaagaacatccctgtttttatatcgaggagctacaaacagctttaaagtcagcgtttcctgcctccaaacatttctactgctactatgctctgatattcaaccttggtttaacgcgcaatgtccaacgaagcgctcttcaccagaaccttgcgcgagagaaagagtccccgccgaaatcggttcttactccaaggagttagcgcgaatctatggggaacctcatcagttgccatttcttgcagcgaaccgatctactcttgcagtggcaaccgctccattcttgctctgcgttgtgtttgggactggcggttgattagcttaactttaacttagagttaggctgcgagatatgatcaccgggaacgatttgctcgttggtttagatcccttaatcgcatgccaaagttcgtgcaaagcacaatacatgtagcattttttcggtttgtcccagcaaagtgcccgactggggctaatgtaatacaactttttcttaacacggcaacgtgtccagtttacgatggcggcgccagcgtcgccgtcggccatgaagcgctggctggcgcctcgcgtgctgtacctcgtgtccttcctggacatgctgggcgtgtccatgatcatcccgtcgctgccgcagtacgtcaagtccatggacggcggcgcgctcgtgttcgggctgctcatgtcgctctacggcttcatccagttcttcgcggcccccatcgtgggcagcctgagcgaccactacggccgcaagcgcgtgctgctcgcgtgcttcgtgggcgcgtcggccggctacctgctgctgggcctgtcctggaacatctacgtcgtgctgctgtcgcgcatcccgtcggcgctcttcaagcatacgctcgacatcatcaaggtggccgccacggacgcggagagcgccgacaagcgctcggccgctatcggccgactcaatgcggccgccaacgccggcttcatcatcggccccatggtcggcggctacgtgagctccgtgcccaacggattcaactacacggcgctgctgaccacggcgctgtttggcgtcaactacggcctcgtggcgctcttctactcggcggccccaagcctcatggcgacggtgaagagcggagatggggagaagaagaagacgacgaaccgccaccaccacgtggactggaagctcttgctgcacaacgcgtggacgaagctgctgggcttccgcagcatcgtcaacgagtccaagccggcgcagacgctgctggtggcgaggctgctgctgtccatggcggccattttgtatcgcacgcacttctccgtgctgctggaggacaaattcggcatggattcacgggaccgcgggtttgtgctgagctacatggggctgctgggattcttcggcagcttctccgtggggttcgtgaccaagttcatgaagtcggagaggctggtgctgcagctgtcggctatcgtctacgtgatgaccttctttgcgctctcgagcgccaccggggtcagcaccgtgtacattacgctcgtgccgcaagtcatttccatcaggtgagaccgacgacacccacaccgtgcttgccttgttgtcgggaactcatacgaagtgtacctttctccgcctggtagcatcattcgcgcgagctccgtggcgctgcagactacctttgtttcgcaggagcacgtcggcgccttcatgggcatctcctcgtccctaacggtgagtcggcagaggttatttctcacagtaccgctgcgagtgtggtgctcattaatgtgttacgtatctgtgcttggtgaatcaccaatgctcctccagtccatctccagaactgtcgggcccagtgagtatacattatttcctttgcagctactactgcctctagcctaacgcttacgtgtgtgctgtgcgctctccaatgctagttctgtcggggtggacgtacatcgcctcgatcgatgggccagcgtatggcgccgcttgtctcgctacagtcagtgccgctctgttttgcttctccccgcacttcgcggaagtgggcgattcgcacgcagctgatgctgaaggcaagagcagcaggcggctggccaagaagaaggctgttgattagagaggccttactggccttccaccgagcgggtcggtatcaccgacgttcttgtttggaagctggggccccaggcgcctttgcccgcggcgttccaggaccggaacataaattcatagattgtgttgaactgcagaccttcgaccaacgcgctctgctggcgcgacttgcggttgtgcgccaccctctcggagcgccacgtggcggtggcgctgtctgccgctgattgtttttccagttcgcgcgtcctgacttcatcctggttggtggctgcctcgttctcgtcctccgttactagtcggcgataccgcagctcgaacttatcaatgatggctccgttagataaaggggtcgtccacgaaacgcgcagcagacacttgtacacggtttgctggatcgagctcgtcttgaacgacccggtgtgcgtgataaccacctcggacgaatagctacttgaaaaggtgacgtcgctcgtgggcggcaacgggagggatggaggttcttccagtagcctcacgcatttcgcactgtccgcgacaattttttcggtgcttcgagtcctgtccggtagtgctgcgtgtgcacagcactccccaacgacgtggacgggagtttgtttgaggtagcaaggagtcgatcgatccgcaccattgacgagcagccagcggacgatgtctggtcgtgaatacgcgcttgctatgaacagaggtgttgcgttttgcagcatccaccagtgcattccttcccactgaagtgtccacggcggcattgcagcagtaaatggagctgagatcatgtcgatgtgggccagcaccagtcgctcaacgtctgcataggaagcaaagagcaccgagtgtgacgaaaggttaaccacaagcaaccgggactgcaaactggtccgagcaacgcacttggcaagtcacccgatgtcagtgcacgcagaagctccacacgccacgcgagatcggcgctttcctcctccgcgacatcgtctgccttccccatagttgactctgctcgctctgcactgagtgtaacgcatgagctattgtgatcagagtgtgcattcatcatcatcgcgttttggttagtgctctagctgtccccagcttgtaactcggcctccagctctaacgtggccgtgctagcgctcagctccctttccagttcttctagagcgttactgccagtgtctgatgccgcagagctcaaccgcgacgatctccgaggtctaatcccattgacggagatcaacgatcgtgcgctggtggtcgtgcttggtgctgcatttggttttacagctcggtcatcagagatatcgccatgcagttccgccaacaccgcttcactattgcgccgggggcgagacttcagctgactcggagtaggggcttcctccgcgcagtgggctttggatcagctttcttggccggcggcttctgtttcggcgatgccttggctgctattggagcgtcaagctccgacatcaattcggccatgccatcgctctcggtatccgatgaaacaccacttgtccgagcggactgctgtggagcaatagggttagattttacttgttgcctcccacgagccttggacggtgtccgagtcgctgctgacgcggtcattgaggcagaagtggtcgtacgtgccctcttcgtattccttggagcagcggacgactttggctgggcaggccgctttgaagacgccacgcctcgtttccgagatggcatttcagtttgccctgccaatggtaacgctgcagttgtagcgtgtagctccctctcaagctcctcgagggcgttgctaccagtatcagatgccacagagctcagtcttgacgatcttcgaggcccaattcctttagctggtgtcgcgctgggcttcgcgtttggcgctgcgcttgctagaggagcaacaggatagtcgagctcggtttggagctgcgctatcaaatcactgctttcggacgcgatcgatgagactctcgttcgagtttccctgcgtggaggtgcagcgagctgctgatcgcgattcgtaacagcggcaggggctttgtttcggccattcgcgcggcctgcaggctgccgagtcttttcctttgctttcggctttgctcctggggcgattgctgcgccattcgtatcgcgaacggggcggaaaaactcagacttagacgccccagtcaccatcggaacggcatccagctcagcttgaatcgtgtcaagtccatcgctttcggcagtcgaagacgcagcccacgaatcggtgacgggaatgcggctaggcgttgagtcgtgtggtcttcgccccgtcatagggcgagcatgttcgatactagcgacggcagctgatttctgtttggatgcttgaacagtacgagttgctgttctagagacaatacccgcagagggagcacttcgaccacgctttcgccgtgcaggagatgttggattagccagagctgcttcctctagtgctctgggtggcgcctcatcgacactttgctccagctctcgctccagatcggcaagagcgtcactgtccgcttcactaatctcactgatagccgaggaatgtcttcccgtcgatgcatttcgagtaggcaaggtagatattggagcaacttggtcactcgaaacgtctgcgtgcagctcagactccagctccgcaagaaatgcctcacttccttcactatcgatccgacgacgaggttcacgacgacttgaggcaacggatctggccaccggactaaatggagctgacatgacgctgccacgatcactcagagcaaggatgttggtgctgtcgtcccgttcactcgcgaacgcttcgagcatgtttttggcttcttcctcgcgagctgcagcagcacgcgcgcctcgatccattctgcgggcctcttccttttgcttgtactccatgtatgaagtcaaggagcgaatcagctcttctccgttatgtcctgagccttgcaggaggggaccgggaagtttgggagggcgacgcccacctaagcgtgcgccagaacttgatgcagccgccccagacgagcgagctcggctcattatctcctggtagcgatcattaaggcacttgagttgctccagtttgctctgctgcacctaatacaagcaatgcaaagtacacagaaatgaggccactgctaatggcatggaataccgaatacatgggtaatcgtccacgtacaatggcgtcttcctccgtcgcactgttcacaacggaaggcacatcttgacgtgcgccagtttcaccaccacctcgaggtctttctgcacggtcctggactcgaacacttgggccaaatcccttcaagcagcggaggaacgcgttatcctgcaccacaagccggtgcatcattgctcggacctcgcgggctgccgtcgggaacatcgtcgcgcctgctccgctcatgacgcagttgaccgagatcagcgccgtccagtcctgcgggtccacgtcgatcttgtgcttcggagcgccgagttgcaccgagtacgcgcagtacagcgcgaacacgcgcccaatcagcgcagcaacgtcggcctcgctcccgaactcgccgcctcgctcctcaatgcaccagaccagtgcgtccagagcttgctgcagaatggccttgtgcgtggtcgtgggggtgctctcccagaactcgacgtggaaggcggcactcatccgcgcgtcccgccacagccgcttccacgcagcgaaacccacgacgttctgcacaccagaagagcaagcagcgtccagtcagtagctcattaacgagtgatggtaatgcactgttgctgtcgcccacctcctctaggaagcgtcgatgcagatcgtccaggtcggcgcggatgcagccagcgaagtgctgcagcgcgcgcgcccagtccacgtcgggggcctcgcgctcgcgctgcttcaaggaccgatgtgcaccgggcggtctgcgaggcagcggcggcctcgagtggccaggcggtgcccccgcagcagcggcaggaggcgcggcgccaacacctccattcatcttgtgctatgtattgaagggtttgtagccatctggctgaattgacattgcaaaatgtttaattgcaaaactgccacatacaaaacacaagtgaacggcgcggccaattaattgttaaatgatgtgcaggcgagcaccgcctcgtcacagttttcgcctaacgttagaagtccacgcactggtcgatgtcgtcgtcgtcgtcgaagcacacgaactggccgtactcggacggctgccgcatgagcggcacgcgtttcctcttctgccgcaggagctccgcgatggcctcgcttgtgggcaggtggaccgccacgaaagcgaagaggccgagcgtcagcgccgagtacactgtgaaggcccacggcagggacgagtcgcatgtgacgatggagctctccgggttgtcttgtgagctcgtgcagttgagcgaatgcgtcgccggcaggatccgcatcagcacgtacgccatgaacgggcccagcgcctggcccaggtagatggcggcggcgaacaggccaatcacgaggttcgacccgtgcgtgcccttgtcctgcacgctcgccagcgtcagcggcaggcccggcgcaatggccaacgcagtgccgcaccccatgagcatcagcgagacgtactgggcgagccacagactcctggtggtctggaacaggccgttcaggaacggcggcgggccgaggaagaagaagccgacggacagcagcatgagccccagcaagatcacctgcttggagccgcagttgcgactgagccacgcgtacacgaggccgcccaggaagtagacgaacgcgctcagcgcgaagcccagacccaccgccatgtgctctgcgcccaggaccttgtgcagatgcgtgcccaggtaggggtcgatgaagccgaacgacgacatggcgaagctcgtcaccatgaggctgatcacgcacgtgggcgtgagtacgtctttatatcgcacgatgctgaacgacggcgtcctgtacaacgacctggaggcgctccgtgccctcggcgcggcgtagatcccgtccggcagcgagtactcgatgaagatgaacggcacgatgatcacgaccacgatctgcgcgacgcccgaggcgaggaagggcatctcgtagccctgcgtctcgtatagatagctccccagtggcggcgctgtcacgaaggccgccgcgacgacgaactcctggatggccaggatctggcccacgtgggatgcaaactcttccgacatcatggagaacgagcccacgaccgccgcacccgagccgagtccctggaagatccgcagcaggaaggccgacgctgtgcccgtcgcgtatccaaacgcaatagtgctggagccgctgagcatgagcccgaggcagatgagcgtctgccggccgatcgtggggctcacggacgccgccagcgggctgctgagcatgatgcagagcgggtagacggagaagaagacgctgagctcggcgggcgtcatgagccccctcttggccgcgtaggacgggtagaagcccacgggcagcgacgtgagctggttcgtgaggaacaggatgcaggacgtgacgagccagatggcgagcgaccggaccttggcgtgctgcagcgggttgagcggctgcgagagctgcagcatggcgtccaggctcccggcgccgcggaggctggtgccgcccttgtcgacgtcgtccggacgctcctgcggcccgtagatctgcgtgctgtgcgccaccgcggccgaggcggacggccgccggtcatggcgcggcggcagcagcgggcgtctctcctccatcacgagcagcgcggacaccaaagagaacggttatggatggcctcacgtcgcgcttgtgccatctaagaatacgcactgacttggagaatgtatggtccgatttgaagagccccgagacaaagacaaggcggcgccacgcactttgactcgcgaagatgccgccgcagcaaatgcaccgggactgtgtcaatcaatgcgctcctagctgcgctcaggctcggttagctgggaggactcaaaagcgcgacgttgcatcctcttgccgctatagcgggtaaaactagccgctcgaaggccgttgagaccgcagcaaactcaccccagccgacgggtctgctccccttcgggtgatatttatgagctgttactttagcactattcggctgttgccctcctacagcccctgttcacctgtcatgagccctgttctgctgttgctttctgtttaacctgctactttcttcatggatttctcctgagatatgtgtggactgtggattacagaacccagcaataaatcttactccgagttgtgggggcaggcccattcgcacgaatgctcggcaatggtttccgcctctggaaattccgggcggccctaatttgcgagtacagtaggggtttcttcggctacgtgcccttgcaatcgctcactaccttctgctacatgaatttacttaagtacagcgctattgttttacttctgtatcctacggatcctcaatagcaaagagcagtccatttgcaagttactagctatgggagtagccgatgtacgtttgactgaagtgctttggatgaagcggttttgaattatcgaagcgaatcgcagcttgagcccgcaactggcgtttaatctaaaatactacgtagtatttgttggaggacaacagcagaccagggtccttgacaggtcagtaggagctgtacggtaccaacagctcgacagtgctggaacaacaggtattaattattttccctcccctacgaccagcatacaaccgaagctgtagtcgaatccgacgcaacgccgttgacacttacgctaacgcgttcgtttgtggagcccccgggggcaggcaaaacaaacgcagcgctggccttcgcgtttggcgcagtagatcgcaacttgggacatcgtttggattcgctacatgcacgagtccgttttccgctgttatactgctaagggtccacagttgtgagcggcaaacgtgtggaactcgcaaaacgtcgaggatttactgttctcatctctggcggcagtgcgcgcatgatgtttgccctcacgacggccgaggcgatggattcgtttgagaaagtcctgactcgcggcagccttggctcgagcagctttcgaaggggtctctagtggtgaagttgatcggcttgtggctctgtatcgccacgagaaccgagtatctggtcacgagctcgtacgttttgcgagaactcagcatctgacttggccccgagaagttcttggctgctgtggatttacttccgagaaacctgtcaatcgacacgtccttcttcggggtgtctggcgcaagttgcggtgactctgaccacggtgcccaccaccaccaccaccaccattgagtggttccttcacttcgatgtcgtggagctgcaactgagagtggaaacactcgccgacaagcagtgaagtgtgtcattcatcattcaggtcgaatcaaagcagctactgtacgacctcgtcttgctggacaaggtgggaggaatcattgggcttgtccagttgatcagactttccgagcacagttttatagcaaagacagtctgtgggttctacttcatctgcactcgtgcgagtggatggagcttcgctccgtggtgctcaaaagcatcgtttctcaaggcaagttttacagcggaacagaacgctataaacccttgccttgagaagcgtcttgctgtaggcatttatgaaggtatggcactttctgtatcggatgaaatgaagtcgctgaaggcgggacaagagttggtcctttgtgctgcttgcaattcgagcattcgctttttggttcacagtagtcaaacagggtggaattgagttgggcagattccatgagacgttgaagtcgcaatcccgacggtcacacatcgcgtcgagtcgcaagaacgagccatatgcgcccgctactgttggctctgcgtccgcgcgcacttcctccgtcgtcgtcgggactgctgcgctgccgaggcatgaaggtgtacaccaagacaggagacaagggcacgtcgcagctcttctcgggcgagcggcgccccaagaacgacgccgtgttccaggcgctgggcgacacggacgagctcaacgcgcagatcggcgtggccgtcgagcaggcgcgcgtggccgccaacgccttcctgccgcccaagctcgagcagatccagagccgcctcttcgacctcggcgcctgcgtggccacgccgctcacgtcggcgtccgagaccaagcagcgccgcacgggcgtcttcgacgaggccaacgtgacgcagctcgagctctggatcgacgagatggacgcggagctgccgccgctcaagtgcttcatcctgccgtccgggggcggcctcgcctccacacacctgcacgtggcgcgcgctgtgtgtcgccgcgccgagaggagcgtcgtgccgctcgtggccgccggggacgtggacggcgtggtgcagagatacctcaaccgcctgagcgacttcctcttcgtgtccgctcgcttcgcggccttgaaggagggcaaggaggagaccaagtgggtcaaccagaacatcaagcccgagaagaagaaggacagcggcgatgagtagtaagcgaggactttttcgtcttcttcttgctgtaatgagccaagtttctctatagtacggcccaacgaacgagcagcatttgagcatggttgagtgagtctcgttgcccttcagttatgagtcgccttcgtcctgcacaaactgccctccgccttcagagccgtccacgtcgccgccctccacgcgggtgtacttggccccgtactccttcagctcctcgcacaggcccgagagccaagttgcgtggttcgtggcggcgtgctggaccttctcgcggcctctcgcccagcgcgagatcttctgctggtagacctgctcggtgcggctggcactgctggtagtcgtgggcgttgccgcgaccgcgaatcgatccccgctacgagcagagcagcgtcagattcagccgaacgtttaagtatcagagcaccatagctacttaccgcagaccaaacgctgttcgctgggagcgcatccatcgcgcgtcttggccagcgccgtctcctgcaacacaagagatcgttcttctgggcgcaaagaccgctgatgaggaggccagcgggtaccgatacggcacgatgtcccgttgcagcgcgtacggcgaaggaggaacgtggtagacggcgtggaaatcactgccacggaagcggtcacttggcccttgtggtgactcctctgaaaagctcccagcgtccgacgcgagctcttcttccagtcgctccagcttctccagcgtcgatgcaagctcggattgactcgagtagtctgaccagtcggcaggaggctcgtcgtcctcgccgtcgctgccactctcacttcctgatagattgttgctacgcccatacgcatttttgtgccttcgcttcaaccgatcgactaacagcagcaagtaccaagttagtgagctcagatccatcatgaacacgccgaggttccaccaccacgtacccgttcgcttcatcttcgcgagcttttgctctcgctgcttgacccacgcctcttgcttgcgcaacttcctcatgccttcgccccagttcgccatgttctagtcgcatcaaatgcccccagttagcctcacctcttctcatcagacacggccaatacaacgtagcgtctcacctcgtctagcatgcgcttcacctctcgctggatggggttcgcatccgaagaccgcgagtttcgcttccactcgttcttgctcgccttgagctggtgcgcctgcttcgtgagaccttgacgttgattcgccaccagagtccgcgcgttgacgagcagctccacctcctcttgcagccgctgcttccacttctggtaggtcttcaggctctgcttctgctggcggtcagagcgactcggacgcttcgagtcgtgcagctgattgctcgccttgaaccgttgtccagccacatagtcgtcagcgtcgtcgtcgtcgtccagggtctcaggctgatgccgtcgagcgttcagcttgttgagaagttgccccggagacgcaggggctgatcgagctctgtcacttttgcccacctcgttgagaggcgactcgagctgcttcgccagctccttctcccgtgcgacctgccgaacctcgcgaagtctcgcgccgagttcgtcctcctccttctcgatggctttcgagatgatctcaatgtcgcgcgccttgcgttcgtgcagatcgtgctcgaaccgcttcaactcttctcggacctggcgcttcgcctcgttgcgcttcacgtcccgctcgtgccgaatctgctgcatcatttgcgccgacagcgcctcctcctgctccagccgctgctgccgcaccttctccagttcggccaccaggtcttccagatgcctctcgtactgggcacgcagccgagctttgtgtcgcaccagcgcctgctcctcccgctcctggaagtcgcgcaactggttcaggaagtcgcttctgagcgtgcgcttcttgtgctcgtactcgagtcgctccaccagagccagcgactcgagtgcagacacgtgcattttctgggctgcagagcgaagcgaggcgacctcgacatggagcgactcgatctccactgactggtcacggcaccgcgcctccagcgatgcgcatcgacgagttgaagcctcgagctgcgacgaaatgtccgctaagtggagctccagctcgtttcggttggcgtctgcgagctggagcttcacgagcatcacgtcgttgctcgcgctgatggactttgccgactcccggttggcggaggcggacgcaacgttcgccatgttggcattcagcagcgcagcttgcacctcctccttgtcgctgaggagggacttgacacgcgcttggagcgactcgatctcgctttctttcctggccacctcgtccttcgctgccgccaactccttgtccttggcttggagctgcatctccgccctgtccttggcgtgaatgacgctttcgtgctccacttcagcttgctggagcttcatcttcatggcgaaatcgtctcgctccttctgctgctcgagttggcggagcttctgcgtgagttggtcgattttgctggcggcagcttgcccattcgccttggctttgctgacttggccttggagctctgagaattcggctgcaagagtgcgtgacttgcggtgagcactctccagctcgtccaccagactttgttgccgctgtgaagccgcgtctcgctctttctcggcagtccgacatcgcacacgctcgccctcatactcggcctccagtcgatgcgtcttggctagcaactgctcgaactcttggttgagcaccttcatgcgggcttccaagtgctccttgtccgactccgccaccttcaggttggccctcaactgctccacctcgagcttcttgtcggccagagcctcttcagccgatacgacggacttctcctctcgcttgcgagacatattcacctcgtctaggcgcagtgtcagcatcgccttctcggattcgaggtggcgcttgtcgctctcgagctgccccacgtctgcgtccacctttcgctttgcttgctccagcgcgtggacctctttgcgcagcgaatcacacgcgtcctcccgctctcttcgagcccgcgactcgttctcaagctgctgctgcagcgtcagcatttgctgctgatgcttgtcggtcgcccccgcgagacgctgcgagatctcttcggctttcgcgtcgagctgctcgcgcagtgccttcttgtcgcttgattctttcgtgagctgctccttcagttgcgagttcgccgcttgcagcgcagcatgctggtgctgcagctcatgcagctcggacttcgtgcttgccacctccgcttgggcagatgcaagttgacgctccagtgatttcagctgttcatgcgccaccgatgctgtcgccgatatgtccgactcgcgtcggtctgcagtgtccttctcgcttttaagtgactcgcatttggctctgaggtctctggactccgcctctacagctgcaagcttcccctctagcgacgatagctcgcgctttagtagactttcttgctcgtccttctcccgctgcagagctgcgactgcggtactggacctctcgtgctctgctacagcttgagcttcggactcttgtttggatgtagtgagctcgttctgtaacgtttccacttccgtccgtgcttggacgcattcactttggagagagcaaagccgattttgccaagcagagcactgtgcgcactcttgaggagcggtcggtggtgcctcctgtcgtttggcttctaggagctgaccttggagttcctccacgttgcgttgagcctgggcgagttttgtttccgcggcgctcttattgagaagaagcgcctccttttcaccacgaactgctaccatttcctgctccaattcacgctgctgctcacgaagtcgactaacttcctcctcgtgatcaaccaagcggaccgtttcctctgcggcacccgatgacactgtttctagctggtgtttatcactctccaaccgcctcagttcgtcgtcaactctgtgtttcgcttcttccagagtttgcatctctttccgaagtgcgccacaagcatcttcctgctcctgtcgggctcgtgactcgctctcaagttgctgctgcagattttgaagctgctgctggtacgtctccacttcttttgcaacgtgttgagcagcctcttcggtctttgaatccaactgctcacgcagactcttcctttcgttcaactccttcatcagctgccccttgacttgagcgttcgtagttaggatcaccgcgtgctgatcttgcagctcactaagctccttctttgtgctggcagcttcagcctgcgcttccgacagctgcctcaacagagcttctagttgtccatcgtctgctggttgtggtggatcacctggagttgccgtgtccagtttgctctgaagagtagcgcattttgtcctcaagtcgctagactccgcatccaatgaagcgaccttctgctgcagcgtcgcgatctcttgtttcaaagcagcttcttggtcacggaaggctttggcggcgtcgttcttgtcctctgcggtagctctagcttcagactcgttctttagagcttccagctccttcttcgtcttttcagcctcctgttgggcttcaacgcactcggctttaagagttgccacgcgatcctccaaggctgaacactttgtacattcctcgcgtacagatgcaggtgacgataaacgactgacctccgcccgaaggtcttcaacgtcgcattgggcgctgtcacgctcctgctctaagacgcctttatctcgaactagggtctccctctcgcttcgcattgactccatctcctgctccaaacgcttctggtgggattgtaggcgctcgatttcagatttcagctctgttgccagctgcgcagcctccttcttctccccaaacgaggtcttcatcttctctgtcaacttttcttgctcacgttcaaactcttcctgaatctcgcgttgcttggcgtcgtgcttcattcgcaagctttccgtctccgacttgaattcacggtccaggtcctgcttcttgcggctgagagcgttctctgtttcggactcaagccgcttcagctgctccttccgactgcgctgcaatgcgttctcttctcggtcgaattgattctccaagtcgttcttcttcttgtcgaactcgcgcctcagctgcttcagcttcatctcttcggcgtcttgcacgtcttctagctgcgctttcagcttcttccgcagcgtctccagctcgctctcgtgcgcatcttgaagctcgcgcagcttttcagcatgatcctgggcgagctgatcccgtttttcgtcaaaatcagaggcggcgtctactgatggcgaggacgacagcggctttttacccagcacggtgccaaggggggtcctcgacagaggcttggagagctcgtcgctcttgaaatcattcgctccactgtccagtccagtgccagatccccccaactctttcgcatcactcttgaggggctacaacaagcaagacatcgggagcgttagtaaaggatcacgagcattcggcgctgctttaggtgcaacattttaccccgagacctgtcacgggcttcaatcctccaccaccaagtccacttgacccgagagcgcccaatctgcccccagacagtcctgggagcggcttcttctccaacgggtttgccttccccagggagggccctcccagcggctcagccttcgccagagaccccttcttcttcttcccgctgcctttccgacccagcagctccgccacgtcctcttttaccttctttttcttctcgtccgtctcctgttttagttcgttgtacgcagacaacacgtcgacgctcagtatggcggctagctagacaattctttgggggctgaggataatttacctgtacgtcgtttgactggcgcttcttcttgtgctcctcgtacaaattgcggtaaaactgaagaccgagttagcattcaatctctctaagcaacgtcgatggtggccgtcgaacctcatcgcacgggtggtcccaagtgctctggcccgtggcaaagttgaagtagtagatttcttccgtgtctgttgtcttgcacggcttccagttctctgggaggggtgcctgtcgatgggaagggggggattaaccccatttatcgtcagcagtgcataactcgaagagaccacgagctaataggccacttgccttcaggccctcccgagcaatccagaacagatcgcgctcggcttccaagtccatcccaagccacgtggcgtactccagcacttccttctcggtcggctcatagttcgggtcgatctcctcctccagcacgatgctgtcgctctggccctccatcgctccccccgacgactcgtcgtagcgaagattgactaactcgctactggcaacccttcgagcgaaacagccccccagtccccagttctcctggctcgaggctagctggtcgaagggcggggcggggtcttctgggccatggccttgtagtagtgcagagtctccacccagtagcgcagcgattcttcgtcttcgcaccgcagctcgtaggtgcgagacccctgcgggttcagccgcgtgctcagatccacgactacatcgaagtggaagtggttgccgcgtgcgtggcgctggacgaggatgttggagatgcgcgagactgcgaaccctccgcgaggcgtgaaccctcgcgcgtagtcgtccttgctgaagtggtagctcaggatgaacgtcttggggtcgaccttgaaccagcgcttctcccagccgcggaagatcgacgcgctcttcttttccagcatgccctccaacacgggcagctgctgctgggtcaggtccgtgcggatgcagagtctgttcatctcgcgcactagcgccaccatcgtcacacctacttccctcagctcccgtgctttaatgcggtccacgtctgctgttagtcgagccacgtccgcgttcacgtccgggtacccggcgagaatccggcgcttcaaggactccacgcgctgctgcagcgtcgggaagtcccgaatgctctgcccgatggggactgctgacgacaaccgcgaaggaggggcctcggtcttggtgccatgcggtgactcgccactgctccgtggtgcgtcgtgtcgcggtcggagcgattgcaagcttgggttcggggctagattgaccctcgattgagcgagggggtcaaaatcggcgtcatcgggatcgtcggcgatcgaggcagcgccgctggagtggaaagcggagaaccggtcgcttgtggagcctccgtggggcagcgaatgtgccgaagtctccgagtgagacctcaacacgcgtcttcggtccacatcaaccgactcttgctcgttggcgatggtggcccctgccttcgacccgagcgtcttgctcttcacccccgcagcttcacccttatccagcctcgcagactcctcggtggggctcagagcccccgacgacttgtagacgacgtccatgacgcttttgcgcatgtttcctttaagtagcgtgacgctgttggctgcagtggaaggcccgcgctgctgcttgaggcgcttgtagacctcccacgggatgtcctcgctctcgatgtcttccggctcggcgctgtcgtacagcacccggaggctgcgcagctggtacgttttcgcctgctccatctcgccctgcctacaggagggggagggacaccacagcgtcagagagagaagaagctacagagcgaaggcaagcgctcacatttggctgacgagcgcgaggctgttgagcgtctccgccaccttgaggctgttcttgccgtggcactcttcgcgcagcgccagcgcgcgcaacaggtgctgcacggcgatgtcgggcaccccgtggagtctgtagaccgtgcccagctcctgcagcgcctccgctgtcaggtcgtctgtgccacacagcattcgttccagtcggtcagtcagtctgtgagccagtaagcccgtcgtcagtccggactcgagcgtaccggggccgaacttctcgtggatgacgagtcgctggtgcagcagcgggagcgccttgtcgtgctcgccgttcatgacgaagagcagcgccaactgcttgaggtcgtccgacacgcgctcgtggactggcaggcacgaggtgagccccagtcgggagtctactactgtaatattctactgcactacaggtagaaagagcacgcacactctccgtgggtcttttgcgccgcgcgcagtcgctccgcttgctctgcgatggcctggggcacacgaggacgggtcagagcgtgtgcgggggcagcagtcagtcaggggctcggcggggctcgcaccttgagcagcacgttcacgtcgccgccgccggaggacgggccgctcgcggtcgacattttggtccgatttgctttgcggcgaacagagaaagtgatgtggcgagtattttgtcaatccgacgggcgggtagataggtaggtagcccccccccctcgtcggtaggaccgtcgcagcagcaaaggcgtcaaggcagaaggccagagagtcgaccaaagcaggacaggtcccctccaggacagttttgcacagtaagctcgtgctcatcggactgtggcgccctgggaccgcagcggcgcccagcgcctccacgacgcacatgaaggctgtggggctttgcactgcatcagtgatgagcgtgtgagggcagcagcagcacgcgtccgccgaccggactttgacgagccgaagcgctcggaattcccgccgttcccggtgggctcgacgacgatgagacggggtcggacgtgcggtgcgcgcgtgcctttcaccagttgcggtcactctgcaatttgcctcgccgtcgatggagcagtccaaggagcgcagccacgagcacttcgtccgcgtcgagtccccgccgctggagccggacgtgcccaagatcacgctacagtggcacgagctgacgctaaagctggcggtcaagaacccgagcaccaagcaggtggaggacaagcagatcctgagtaacgtcagcggcgccgctcgcccgggcgagctgctggtcatcatgggtccgtcgggcgccggcaagagcacactgctggactgcctctcgggccgcaacacggccgtggagggcgccatctccgccaacggcgtgcagtggagcaagcggctcaagcgcttctcgtcctacgtcaagcaggacgacatgttctacgccaccatcacggtgcgcgagcacctcctgtaccaggccaggctccgtatggggccgcataccaccgccgagcagcacgaggagagggtcgacacggtgctggaggagctggggctcgccaagtgcagggacacgctcatcggcggcatccgcgtgcgcggcatctcgggcggcgagcgcaagcgactgtcgttcgcgaccgagatcctgacgaacccgttgctgctgttcgtggacgagcccacgtcggggctggacagctacatggcggaggcggtgatggttcagctgcaacagttggctcgagaggggcgcacggtgatcaccaccgtccaccagccgtcgtccgagctcttcacgctcttcgacacgctctacctgctgtgcgacggagtgacggtgtataacggcaaggcgagcgatgcggtggcgtactttgccgagctgggctaccagtgccctgggttcgtgaacccgaccgactacttcatgtggcagctcgtcgtgctcgacagagagaaagacgaggctggggtcaagagactggagctgctgaaggacgagtgggctcggaagcacgcgggcgccctggaggctcgaagctcgggcgacgtcgccttgatcgaggaggctggcagcggcgcggacggctaccaggacaagcacctggggccctgagcacaagtgcaggtcctgtccagccgcaatgtgcttcggctagtgcgcgaccgcatctcgttccgagccaactttttcctgcagctattcatttctgccatcgtcgggctcatctacttgaagctggacattgaccagactggcatccaaaactttgcgggcgcttttttcatcattatcgtcaaccaaactttcacgacgtcgagtccgctcttcatcgccatccccaccgagctgccaatggtgctgcacgagtacaagtctgggctgtatcgcctcagcgtgtggtacctggccaaaatcctcagcgagctgcctttgcaagtgttcatgcccttcgtcttcttcatcccgacgtacttcctgatcggaatcgggcacggaatcgtcacgtacatctcattgcagctgtttgtggtgctgttaaacttcggtgcggtcggcgtcgggtatatggtgtcgtgcctgtgtcggcgggtggagatcgcgccaatcgtcggcatcgtcattttgctgccgttcatgctgtttggcgggcttttcctcaacgcttcgtcgactccggcgtacttcgtctggatccaatacatctcgcctatcaagtacggttacgaaggcatgatgaaagtattctggaacaaaatcgactccattccttgctcgagcgacccgagttgcattgctcgcacaggcaaggaagtattggagtactacagcattgtaacagtgtagtggtgcgagtgaactcccagcaggcagctgtgcctggcacgtgagtggggttgaccccatgcagccagtggcgtgcaagcggagaacgaagcgcccaggagaggtccgagatcgggattcggtggcgtaagtttggaccaatcaaattcggtgactttgacttggcctcagtatggaaaaagcggcgagttggaaatcgggccaaatagtgtggagttgagtgacagcagtgtcgagtcaacattgaagaagcgagagagcgacagagtgcagaacagagagcagtcagaacagaatttgcggccaagggcgcaggtcaggacaagtgacgaagcgggcgacaggaagtttctcccctgttggttgcggacgagcagacgagcagcgagtgcgaggtgtcgagggacggcttcgtgccgccgctgatcaacagaccagagcacgggtgcgggtgaggctggcgacggctacggggtcggcgccacccaacagtccggaacgcgcgctgtgggtgaggttagtgacggacaccgacggaccaagcacggcagacaaactgaacgagctgagcgagacgaacgagacggacaaggcgaacgagacggacgagctgagtgagacgaacaaagctgtagtgacattaataaatagggacgagagttccggctggcctacaggtgttggactttgggcgacgactgcaaacgaccgacgctaacagccgggcaaaacaagaggcctgtttcgtggtggtcatacaggggcctcaattgagcagagcgagcgaatttgagagtgccccagcgacggagaaaacgagcatggcgactttggtgcctacgcgcgacaagaagtccgggaagtcgaggcgtgtcacccgacgctcacccaaggaattgttgacgcgaacggatgacgacgacgcgtcgggccgaagcgacgatgacgacgaagatgagcatgaaacccaagatcctccgggccagacgaagcagcacgaggacgaagagacgaaggcgaccgatcacgaggagtccgaaccggcgccagcgtccgaagagccgcacgagagaagcacggagcctgaggagcacgcaagtcaaaggccaacgggtgacataacgagcgagcacgctggacgaggcaacgaaggaacgataccggtacccgcggaggaagtagcggcgatcgccactacgctgcaccagttgacgacggtcgtgacaagtctccaggtccaggttgcggaaaacacgcgtagtcgagggcaggcgcgcgcggaaatgggtgctcatcagtgcgcggtacgagaagtggtgctgcagcccaacgaggagaatatgagtggcagtcagcggcgcgtggaagtcgtttcaacggcggcgagccgtactccggcaggtccagtgacgacggaggcgccgccgactacttcaccaacaacgacaacgacggcgacagcgacggcgactatagcaccggagctggcagccacgacggcagccatgcagcagttcacaacgatggtcgcacgtctgcagccaccaacggcggcaattaggcgcacggacaacgatctgcaacgtgtgaacgaaggagacgtgatgaacgtgcgagtgtgacgcttggagcgcctgacgacggcggaagctcttctgagtcaagcaacagttcgagtgagagcgctcgggcgacgacagcgacggcgacagccgagatgatgagagcgacggtgacagcgacgatggcggtgatggcggcggttcgggcggtggctcgaacgccgatgctaacggacggcaccgacggaacggaagacgaacgcaacgtgcgcgagaaccacggcgcaagagtgtcaaggatctggagcttccgacctacacgccttccccgaaggtatctgttttgacgtggatcgatcgtgtcgatctggccctccaaggcgctgaagaatctggacgaggcaagtggtcggatacggcgctctactacatcttaggcaacaaattgatggaggacgctgccaagtggtgggtcagcatgaatcgaagactgccgaagaggaagagaacttggtcgaacctcaaaaaggctctgctacgccgctacggcgagcgcaaggacaagtcggcggcagagtggcgagtgaacatgcgcccactgatgcccggagaaacgtatgcagactttgcggctgagctgcgcgacgtcatcggacctaacaacgtgcatgagcgcgttctgctcgcgcaattttatcggtgtctggataagaatacgcggaagctcgtccagcaggaaccgaagccgaagacgctggaagaggccgtggagaaggccacggagatcgacgacccgatggataacgtcgcccaaggaatgttgaacagcggcttgccgtgggcaatggcgccgaggccttacctgataccgatggctggaacgacaggacagacgatacctggtattggcggcatgggcctaccagccgaaatgttgagcaacgtggacacgagtgaaggcgtcgtgggcatgaaggaaatggagcacgtggcgcactttactaaccctcaaggtgtctaaaataaggcgactggtacgtgggatccgcctccaggacacgtctggaacggcaaatactggtatgagccccgaaaaacggagaggaagtgtggagtagcgccctcgcagaaatctcgcgaatgcgatctcgcacaaactcggcgcgtctggatagcggtcgcgccgagcaaattattcccggttgttggagtagcgtatcttcgaaatacaggcccaagtcttcgcaggcttcggagttgggggttcttgtgttgacgcttgttccttgtcgtagggcgtcgagccttggacgtgcggcgttatcgggccggcgtttcctcggcgttcccgtcgggcgtgcggcgttatcaggccggcgtttcctggggcttgtgtggcgttatcgggcctacacgggggtcttgtgcacggcggttatcaggccagcgcggtccttcgtctaggcagcgcgttatctggcgcccacctaaacggtatacgtttaacgtgcctttgttccagcacgggtctgtgggggggggggggggggtgagcacccgaaccagcaaacgacggagggccgcgatatcgaggcggctctacttgccggcgcttggtggttcccctggaacctcggagaagacgggaggtctttgtggttcagagaaatttcgggactgagtccttaccctatccatgtccttgctactggctactctgtactactgcttgctaagcctaccgctctgggcctatccctacttctgtcgtgcttgcactgccgtccttcaacctggtttgcgtggcgcaatcaagatcttacctcggcgcgttttggtcggcgggggttagggtcggcgcgttttgctcggcgcgtcttgctcggcggggtttagggtcggcgcgttttgctcggcgcgtcttgctcggcggggtttagggtcggcgcgttttgcagaaccggatgcgctggtcgacccgtcggatgattacgtgtcgcactggattctggcaccgtgtctcacggcccatcacccacgccgactttcccgtcgagctcggccctgcgtcgcgcccatcaatccgcgtcgcgttccatcagccgcgtcgaagtccatcactcgcgtcccggcgccttcttcctccggcgcccggcgcgcccacttcttccgcggggtactacaccacagaagcgagcggcagagcggctggtaagcgaccggccaagacgcgacctaagcacgagacggatgaatcgagcggcgacgagtcggacgccaaaccgcgcaagaagtttgaggcggctgtcaagcaggctggaggcgacaagcgacgaggacgacggctgcgacgcggacgaacagtacgacgagcggcacgggtaagccgaacagtggtgtgtgcttccattgtgggcagccaggtcactgggcaacggcgtgcctcaacgagccgaagtgtttcgcgtgtcatcagaccggccactacgcacgcgcgtgtacggatgctgatgcgaaagcacgcaacgatgcttatctggagcagcgtgggcaaaaaccacgcacggcagcggaaaacgagtagcgggcgcgattgagggggtatggcgtccgaaacgaggaggaattccccggctggaggagctgatgacggatgatgacgatgaacggaaaccagtgaaggttgcgaaaacggccaacacaacgagaatgaggacggccgtgcaggcaatgactgtgcggttgacgaacgaacgagacgatgaacgggacggggaggcggcgcgcgaggccaactccaatgcgatgaatgaaaacgatgagtgcacgacgaggacgagacgtgcccctgtgcacacggtgacggacgggacgcaccagtacaacggcggcatggcttcggtcgtgaagatgatgaggaacgatgcagaggcaaaggacggggcgcgagcggctatctacgtagccaccgtgcatccggcgatggcagccgcgcgatacgtgcgtgctgaccaccggcccgaacaacgcgacgagaatgagacggcacgaaaagtcgacggcgaatggctgtctggagaaggcgcggacccggtctgtgctggaggagacgcacagacgagtgcggcgagcgaggacacaacgagatcaagcagtccttgcgagcggcagtcggtgcctctggaggcgaaggcggcggtgctgaagacgagtgcgaaaacgagcgtgtcggtgatgacggacatgtgcgtgatgacgaatgagggcgcgacggcgccgatgaacgagacgaacgagacgaatgagatgatgatgatgactgcggacacggcggggtcggacgagacggcaatgaaggatgacttcccgacggagaagcacactgcggcgtcggccgatacggtcagcagcaggatggcaaagacgcgcttggtggcaacgagcacgagtgtgtccgggcctacggagaggcttgtagatgacgagtctacgaacgagtccacggtgagcgaatcgagcgcgaccaaggactgcgatgagacgaacgcgtcgagtagtgagtcgggcgaagacgccaatgagggcgaggaagtcgatcgggcacgcggtgcgcgacgcaaggcccgtaagcgcgcaaaacgagaacgcgtcaaaatactactcgctcgaaaacggagcgtgcagcgcgagaaggcagcggagcaacagcgcatgagcgacgagcgactggcggagcggcagcgagtggccgacgaagctgtgaaggagctcgaagagcgtaaactgcgacgcgcacgcgacgaagctgagggacgagtgcggcagcaagggaagccggcacgagtcagccttgtacagcaccgcggcgaggaagtcgagcagaggacagttcgaggtgagaccgtagagtacatcggtgcggacgacgggctccccactgcgatcatggaagtgtcgggcgcgaggagacacgtgaagctcgacagtggagcgaggtatacggtggctggcaccgagtggatgcagtacggtgacagagtcgagagagcagcccctgtcgactacttagagggcattggtggcttcttgttggacgtaatgggtgtgtgggagttccacatgcgcagtgtctttggtgagatcattcgcgtggaggcatgtattgtgtctgggtgtacggacgaatttctacttggtgtcgactttatgcgtgggcatggagcgatcatggacttcgacaggaatgaagttcgctacactacggcgagacgagcagtggtcatcccgttcagaacaagtggtgacgctaacggagcacgtgtagccgctgtacgaatggtgcgacggacggagattggcgcgagcgcagtgacaccagtcgaggtgtcggtagcggcaaatgatggagaagtgggcgtcttcctgcctacgaagtacaccggtgcggtgatgctggcggtgaccgtaacgaaggtccagaacggcaaggcgatagtaccggcggtgaatgcgaagcagggaccagtgcgattgcctgcgaggcaagagctcgggcattggataccgctcgacagtagcgtagagctattgcaaatgaatggcgagctgcggcgtgaacggatcaatgagtgggtgaatggattgggaggtagcaacgagccgctgtaaaatgagcaggacgtaaacatcggcaccgaggacgacgagagcagagcgatgatcgtgcggctgttgcgtgtgtaccggcagctgacgacagacacaggcgattgtccacctgctacggtgctcagcacagaacaccacatcgatacgggcgacgctacacccatcatgttgaagaggcgacggcaggcacaaacagaggactccgttattgagtctaatgtgaaaaagatgctggcagctggtgtgatcgagcaaggcgacggagcgtggggttttccggtcgtgttggtgcgtaagaaggacggcgaggtgcgcttctgcgtcgactatcgtgcactcaacaagattacaaagaaggacgtgtatcctctttcgcgaattgacgagactctcgaggcactcggtggcgccttattgttcagcaccttggatctaaaggctggatactggcagattcgcgtcgctgagaaggataaggcgaagactgccttcacaacgaagcaagggttgtaccagttcgtccgaatgccgtttggacttactaacgcaccatcaacctttcaacgcatgatgaacaatgtactacgaggactcatgggctacttgcttagtctatctagatgatattgtggtttatacacggggaggaattgagcggcacatcttggagctggcttgcgtactggagaggctcgcggcggcaggactcacactgaagctcaagaagtgtgtgtttgcggctcgacggatggaatacctagggcacgaactgagcgcagatggtgtacggccttggatcggattgtgagtgcggtgcgagattttccacaaccacgagacgctgttgaagtgaagcgctttgtgcacttggcggggtattaccgtcgcttcatcgaaggttttggcggcatcatggcgcccatgaccaaactgttacggaagggagtggaatgggagtggacgagtacgcagcagacggcgttcgggcaggtgaaggaggttttgaccagtcgacctctcttgatctaccctgatttctctataccctttcggttggtaactgacgcaagcaaagtggggctcggcgcatgcctcatgcaaaatcgtgaagacggatggcaaccagtggcgtacgcgagcaaggtaaacagcgtaacggaggcaaactacgggatcaccgagctggaatgtctggcggtggtctggtcgatcaaattattccggccatatttgtacggtcgccgctttactatcattacggaccattcagcgctgaaatggctcatgacgagtccaaatctaacggggaagctacaccggtgggcgctaacgctgcaagagtttgacttcgaagtgcagtaccgaccgggaacgacgaacgtggtcgcagacgccttgtcacgagcaccaatgactgcaacggtgctagcggctattggccggcggcggaaagctaaacagcgagcggctgctgcggtaggcagtgagggacaactacgtgagggcggagatgatgacgggcagcacgaagcagatgccgtggtggccgagcacaacgacaacacccagcagcagaaggcgaccaatggtggtgaagaatcacggcgaaagcgagtgacgtgggctagcgacgtggtcggtggcgatgagagcaacagccagctggatggcgacgcagcaacacgagaagcacggccaggtgggaaaatgacgaaacagcgagcgtgcagttgccagctcgagcgcgaagcgcaagccgacgaaaccgacgacggtgacagcaatgagaaccggggagacgcccatgacgagacgagaggcactgaagaggacaccggcggaatcgcgtgaagtgcagttcatggcgggtacggagacgagcggcgcggcggagacggccgacccgaagctgcaggtggcgaagacgagagacagcgatgaaggacgacgaggtgaacggcgacggatggatacagcggtgcgacggaggacaccaggtgacgaaggaccgcgcgtagggcccatacgcggcggcgacggtgtaatgaatgagtcggcggtgacgaaacgtgataacgggatgcagacgacaccagcaaatgggaacacggttgagcgcgtgggcgtgcagacgctccagctgacggacgaagacattgcggcggcgcaaaagaagagtcggttagtacagcggctggtgagcgccggcgagcacaaggggatgacgatcgagacacgccttggtgctggtcaacaccgcgcacggacggcgtgtggtgctgccgccagagctgtggcctattgtcttcaaggagagtcatgactccgtgtgggcgggacacttgagagctccccatacccacgcacggatcgcgcaagtgtgttggtggccagggctactacatgaagtgaagcaatgggtacgcggttgccaggaatgtggaagtcggaaagcaaggccacgtgagatcgtacctccgcttcgaagcattaagggcggagacgtcggcgaccggtgggcattggatgtagcagggcctttgccgatgagcgacggcggacagcgctacgttattgcggcactcgagtacgtcacacgttacgcggttgcggtgacggtgaagcagcacacggccgagaacgtggccgagtttttgatgaagcatgtggtgttcaagttcggaccttttcgcgagttgttgacggatggcgcccctgagttgacgggtaaggtgatcgagggactggtcatcctgctccaggcgcagcagatcaacccagtgccgtaccgaccccagatgatcggattagtcgagcggttccataggacaaggaaggattgcgttgctagtccgagaatacgacgcgttcttccaggccggcagagtcgtggaagactctggagtggatgaaggcgtgtaacagtgtagtggtgcgagtgaactcccagcaggcagctgtgcctggcacgtgagtggggttgaccccatgcagccagtggcgtgcaagcggagaacgaagcgcccaggagaggtccgagatcgggattcggtggcgtaagtttggaccaatcaaaatcggtgactttgacttggcctcagtatggaaaaagcggcgagttggaaatcgggccaaatagtgtggagttgagtgacagcagtgtcgagtcaacattgaagaagcgagagagcgacagagtgcagaacagagagcagtcagaacagaatttgcggccaagggcgcaggtcagggcaagtgacgaagcgggccacaggaagtttctcccctgttggttgcggacgagcagacgagcagcgagtgcgaggtgtcgagggacggcttcgtgccgccgctgatcaacagaccagagcacgggtgcgggtgaggctggcgacggctacggggtcggcgccacccaacagtccggaacgcgcgctgtgggtgaggttagtgacggacaccgacggaccaagcacggcagacaaactgaacgagctgagcgagacgaacgagacggacaaggcgaacgagacggacgagctgagtgagacgaacgaagctgtagtgacattaataaatagggacgagagttccggctggcctacaggtgttggactttgggcgacgactgcaaacgaccgacgctaacagccgggcaaaacaagaggcctgtttcagcatgaacagcctgtcggccgagttcgacggagtgatgctgctagtgctggggattgtctttcgattgattggtctcgtcgcgttgtggtttaatgtacgaggtaagaactgactgcagtatggtacaaccagaggattggactggtagcgcttcttgaaaactcaatgttagtattgtgctttgcatactttttggcacttcggactgtaactcgtactacgtagtacgtaagtaatacgactgatcgaacacgacttatctaacggaattttacgattagaagaccccttactattagaagacccccgctatttttcaagagcgttctagaaataaaagaccgctacgaataaaagaccggtcttagagcagtaatgaaattctgggtctacgtgagcatcaaacgagctcatgttgttctgatttttgcgagtatgcgaacgaggcctgttggtttggaaggaaatccgaaagtgatcaagtttgagtcagacaaatcttcctactctcaagtcctagattagtgtcgtcctcaatagtacagtcagtcctcacttgtgtatgccgtcctcaaatgtgcatgtcgtccccaaatgtgcgtctcgtcctcaattgtgcgtgtcgtcctcattgaggactcctcaattgtgcatgtcatcctacgatgtccatgtgtacccagccaagagactgcgaagtgtacaatcgcaacactgatgctgtggtgtattcgctggacggaggttttcaggtgcggcgggggtgaagttgcatggtaccaggtaagaccatgccaagttgcatgaagcagagggtggcgtcgatattgctaacagttagtagccctcttacgaatattataccccctgtctaagtcgatcaaagttcggaggctactaataaaaacaagtccggccactattcgtaaaaatccgttataaatcgtactcgagtacgaattgctataagccgtgaatggtcaacgagcactaagtagtgcacaaacgggaaaatgaccaagtcggtatgaaatcaattttaaatgccaaatcggtatatttcgtgactgaatcggtatgcgttaattttgaatattgaggtgcgaactaccacgccatggacgtcctaccttcgtgcagactcccagataagtgtcatagcgttcctgacatggttgctgtacttgtggtatgagtacgaactacttttcgtgcttatgtagtgcaacacaaccatcaatacaacctggcatgccaccaccaaactgctgctctgtcgggcggaggaacgctggacacacttttaagaagtttactagggttttaaacagtcttaggcacttcatgatatagtggtgtcgctgtcatgtgatcgatcttaacgggttggcagattggatgaccatatactaagaaaaacagaagcaccggagaagatgcgcttgctctcaggtaaagatatgatgaaaacaagcaagtagtccacaatagacaggctcacaactaggtgtttagttcgtgagtcgaccacccagtgacccgaccggtatgcgtgattggggggtcataccgattcagcatttaaaatgcgatttcataccggtttagtcattttccctgcacaaacgccatctcctccatgatcttgcacatccagcatgtattagaatccgtttggcacttttagaaagtgccatttccgacccaaatcggactcaaagcacgacttgagcaactgctccatgatttaccactaagtacgaacactaactagtgcactaattaggagggcaaactggatgcaacgcacaataccgaaacactaaatatctgaagcatcgaaggggactgagatagcatcttcttcttcttcttcttctttcttcctcttcttcttacatattttgctatctttgggatgtgctaacactaggaatttgtatgtatgtccttacaaagaggtgtcacgcatgtggcacgctcactacaagagacttttacccatttggtaccatgtaccactattcaagtttggtcgaacagacctctcttaccggtacgttgaaagcattgaagtacatgcatgtactgtatggagctgcatcgattgtaattgcaccttcccaactcggtaaattaacaacctcaattggaggcattaatttttgattaataatatttaaagcattgaattatttaatgaaggtcaaagacctgttttacaaaaacattactagagcttcacgtaggctgggataacttggtagttcgcattacagcttcacaaaaaatatcacgttggtggttgtataaattgcagtgtctgagctccaaggtagctgtcctctactggggcaatagcgaggacaagaatgcacaacaaaattcgttccagctatagctgtgaaacgagcaggagcttacctgtctccattttgcttactgaagtgcacctgttaatactactcatatcctagagatctagcgatacaatcaccgtagtacatacagttgtgcgcttctccgggaataggtagccgcctaaaccgcaacaaatttgtggtattggaaagtggcagtttccaacgctgttgacccgccagcccgacaatcaagttcaatcaatgggcaatcaaggcgaggtcaagcgagagacggagatggctgcttctgattggatgatgacattattctcggtagagtgacagtcagtggccgaagcctcgtcgggtcctaatacaaccccgaacgaggcttcacggtacccacttttaggtacagatgcatttagttacgtacttcggccgcacttattagtgtagccgcggtcgtcatttgatgtgtccggaatcgccttattgcgatcgttcacactagatatttgtataggggcataggactcatcataggatgaccagaacgaggccccagggcctcagaaaacttagtaataaaaagacagtcttcccccaaagctaacaaggggcaagtccgacttcggtaagtgttgatggaaggtatggatcttggacacgaagctcggacgaagcggagggagggacgtcgcagacggcgggaccggagcgaaggcacttgaggggtagaatgaagattcgaaagtgattgaattgttggagcttacaccctactgttatagacacgcgaccctgcgtcctatcacctagtgcatctaatcaaccatcactcaccggtgttcatccaatcatcctactcgtctaatcatcggtggcgtaaacaacttaccgtaatcaccataatcaacgtgggttcggattggaccggttcgggttaaccggttaatgggtacaactggtacacagtacccaagaccagcaacccttaatacgccccctcaatgcgaagtcccacgaatgccgagagccaccgtcagatccgtgtggcgtggtcccgcaagcgccttcgtcatgatgtccgctagcatcacagaagtctcgcagtactggagcttgacttcgccgcgcttgacttcatcgcggatggggtggtacttgatgtcgatgtgcttggcgcgaccgtggttcactgggttcttcgtcatcttgatgcacgactggttgtcttcgcggatcatgagttcgggtccagtctcattagcggccgccagaatctcgcatagcaggcgatgaatccacttgccttcttggatagccagactgagcgcgatgtactccgcttcgctcgtggacagcgacgcacttgattgcttcttgcttccccagctcacaggcgcactcatgagcatgaacgtgtagcctgaagtggacttgcggtcggcgaggtcgccggcccagtccgcgtccgagtagccacgaaagtcgatcttgtcgcccggcttgaagcagatcccatgcgtcttggtgccttgcaggtagcgaaagatacgcttgaccgcaacccagtgttcctcttgggggttctccatgaagcgcgatacatagccaacggcgtacgcgatgtctgggcgcgtggcggtcatcaggtgcatcagagcaccaacagcttcgcgaaacggagcgttcaccttggtcgccgcgtcgcttggaaccagtcgagtgctcatgtccaccggactcaccacggccttgcactcgtccatggcgaagcgcttcaggatgtcgtccacgtatcgccgctggcacatggtcacgctgccgtccgggccgtccaccaactcgatcccaagaacaaacgcgcacttgccgctgtcggtcatctcgaagcgcgtcttcaggtcggtcttcgtgcgtgcgatcagctcgggcgaactcccggtaatcagtacgtcatccacgtacaccagtacaagcacgcagtgaccgtccaccaccttgatgtagaggcacggatcgaaggccgacacttggaagccgatggagcacacaaactcgtcgaaggtctcgttccacactcgcgaagcttgcttgagaccgtagatggccttcaccagttccaggcagtcgaagtcaccatccagttcgacgccttccggaaccacgcagaagaccacctccttcattatcccgtacaggaatgctgtcaccacgtcgagttggtcgaggggccagccaaaatacttagcaatcgcgatcaccatgcgcagcgtcacatacttgaccacgggcgagaacgtctcggtgtagtcaatgccgtacttctgcttgaagcccttggccacgaggcgcgccttgtacttctcgatcgagccgtccgctttgcgcttgatcttgaacgcccacttggtatcgatggcgcgttgtccgttaggcaacttggcagctcgaaacacaccacgcagtcgcatcgacttgagctccgcgcggatcgctttgcgccagtgcaattgatcaggaccgttcacagcctcttggaacgtcgtcggctccgatagatcggctgctgcttccacagcgttggcactggcacgccaaaacactggaggcgtcgagtcgtcgtcttcatcttggtccccagacttttcttcttcgtcggggtcggctcggcgcgaggaggatacgtccggcgcacttgcttcttctaagccagctcggtggcgaacggggcgcgatcttctggcagtgttgttgtcgccactcggtcggtacttgcgcttccccgcctgcttgaagctcgtttggcgcggtccatcgttgtcgtccaggtccagcgcgtccaagtccagcacagcatcatcgacgtcttcatccgaagtatgcgtcgaaagtccaaaggtcgactcatcgaagttgacatcgcgactgataaccacctgccccgcctcgatgtcataaactcgatacttcttcgtagccgaggaacagcccggcgcgatccttggtgtcccacttgcgccgtctttccttcggcgtcaggatgtacgtctggcattcaaacacacgcatgtgcttcacactcggcttggacttgtaaacgatctcgaacggagtcttgtgttcgatcttgggtgatggcagacgattcttcacgtagatggctgtcatggccgcctcagcccagaagctcttgtccagcttggcgtgatgcagcatgctgcggccaatcgtgacgatggtccggatggcgcgttctgccgtgccgttggtctggtgcgcgtacggaaccgttgtttgctgctcgatgccttcgacttcgtagaagtccttgagcgagttggtcgcgaactcacgggctccgtcgtgccgcacaaacttgaccttcttgccgaactgcgtctgcaccttcgtgacgtacatcttgatgcagtcctcgctctccgacttggcacgcaggcagaaccccttcatgcatccgctggcttcgtccacgatcagcagcagatacttgctgccacccagtgactcttcttccatggggccgcacacgtcgaagtggagcagctcgaacgtgtcgtagtgacgcttgtcacggttgcttgggaacggcttctggaccattttcccttgctggcagccgcgacacacgcttggtccactcgacttggaaggtgccttcgcgtccttgatcatgttgttgtcgaccatcttgcgaagcacctccaccggagcgtgacccatacgcgcgtgtaagtcgaccgtcttcccactggtcgccgcattcgccgatcgctgaggcgtctggagccagtagagtccatccacgaggtttgccgtcgccaccacttgcttggagcccttgtgcgcaatctgcatcttggtgctgtcgaacacgacttggaacagaccactcttgttgatctgtggcaccgaaagcagattcttgctcatgcttgggacgtacagcgcgttcttgatctcgatgtcgcgctcgtcgccgttgggcagaaccactcgttccacgatggtccccacacccatgatggccgccttgttgccgtcggtcaccgaaagttcgccttcattccgctcaatcaaatgagcgaacttggccttgtcgttgcagatgtggtgcgttgcgccgctgtcgaccgcccacaacccggacacattcttgcccgtcgaaatgccacactccagtgagaccgcgaacgccactcgatcatagccgaagtcgtagttgtagctggcgtcgtcgttcttccactgggcattgttggccccgcgtccacggccattgccattgccgccgcgtcttgggccccgattctcgtccttctgcttggtccagcacttgtcaatcgtgtgccccaatttcccgcagtacgtacactggcgagactctcggtcggtgttgaacgccttggccgcattctccgtcttcaccgtcgccgtcttctcgccttgtctcttgatgtgctcattcgtccgcaccttcacgacgtcttgcgatcgtagttcagcgctgctcatctccaagttcagcacgacgttctcgtagctcttggggaggctgcgcaacaggcagatcgccacgtcctcatcctccatcttggcgccgatgctgctgagcttggcgctgatgttgaggacctcgttgcaatgatgcaagacgttgccgccatccgacatctccatgctgaagagttggcgcttcaggtagatgcgtccagccttctgcgaaccaccgtacagcgtcttcaggcgcgtccacgcaacccacgcttcctcgcagtcgtcgaccacatggtggtagtccgcgtccatgtggagcaacatcagtccgaacgcgatgttgctcgacttgacgtagtcgtccttggcccgcgagtccgtgaagctcggcgtcgtctcgcggttcacgacatgccacgtcgacttggtcaggaacacgccacacacgtagcggttccacgtcgcgtagttgtccccgttgaacttgtcaatggagaccttggtcgaggcgtcttgggcagaggacatggtgcttgggctcataacctgatggaaggtatggatcttggacacgaagctcggacgaagcggagggagggacgtcgcagacggcgggaccggagcgacggcacttgggggtagaatgaagattcgaaagtgattgaattgttggagcttacaccctactgttatagaccctgcgtcctatcacctagtgcatctaatcaaccatcactcaccggtgttcatccaatcatcctactcgtctaatcatcggtggcgtaaacaacttaccgtaatcaccataatcaacgtgggttcggattggaccggttcgggctaaccggttaatgggtacaactggtacacaatacccaagaccagcaaccctcaataggctgaaggagaaaatgtgttgatctcggaggctgacacccgcttttcagcgaatctggaagagtctccggcctcatggggcacggatgacgcatggaggctgacgcaaatctgattggatccgttttggccaataataagagccaaggtgacgtaacgccgtctactccgggagtcgatggattgtgtggtgtagtagcacgcacaaaatcgtcagatgtggcaccctagctacaaacacaacaacagccgagctagtcggcccttgttggcctgcgctgagatgtcccccagcggttcggcccttccgggacagtgatgtctcgtcctcgccgagaccaagtaccccaagccagtcaatcacggaagccagctgagttacctgactccggaattagaaatcccgtgccctccgccaaaggatggacgacggccctcgcgggcttttacgggtcgccgagagcaaaggcttctcgactcagcaatcagtgcccgggacgtacgggaacaccggctcgcagcggtggcgagacttttccttcgcgcttggcgagacacgcgcccaacccgggccgaccttaatctcttggcgctaccagtcaacaccctacaagctatgcctctcgggtgctgacagcagacataatccggcccatgcaggggcttactggaagcgcgtgcacgtgttgtggacctagaaaattctgctctgtttggttgttatctctgtcgggcgccctgaaggggcgcctccactattcctaagctcctatacaaataccaaaagaaagtgggcggttttggatctcggccgactcttcaccgagctcggcgacgcttaagctcggctataccggataacctgtccggataaccccttgaactcggctgagccggatacggcgtgtccggataacctggcgaactcggctgagccgactaagatgtccggataacccagtgaactcggcggagccggataaggtgtccggataacacgacgaactcggcggagcgaccctaggactcgactgggcgactcccggactcaattggacccggttaccgtatctggatggcacgtggtgccgtttagccgagctcggcggcttgaactccccatgatctcggctgagcgtgtccagtgccttcctgaactcggctgggtcttcatcactgggtctgccacgtgtcaccaggtcggggccggtgtgccttgagtttctgacaccatcagccgagttcagcggtccatcagcgcattcttgcccactgagctcggctgacggtcatcccgccgagtagaacttggctcctggtacgttgttccactgcggccttggagtgtgacacaaaacttgatgttccctacaccacacttgggtgaatttacttcgtcggctcggggagccgacgcaccctccgtaatgggggtctccgccaataacaggcgtcgaggtgaaaatagcatgtcgacgctgcaggcggtgcggacggttgcaaacattccgcaccggaaaaacttgcatgctgtcgttcagccgggctgcacgacgaagcgccgggcgaccaagccgggcttgaagtcgctcgcccgcgggataaaccggccggcggtactgaagaagaacacccgtccacggctgggcctggacgaggtcaagagtcttgcggagccgggctccgcaggataagaagacggcgcatgcgaaggtcgctgcgcaagtctcggcctggggccgagacgctacaaggaatgtctaccgggcagacggaggctgagaagccggacgtcgagacgttgaacgtcttgacgcgtacctgcgccgggttccggtacagggagatgactctcgctaaccctccgacgcaagcgtcggagttgacttcgcttccagtcatgagctggaagcgcttcgcgcgtgacttgcacgatgaacgcatcgagcagatatgcattctctcggacgccgagagaacgaagagcgagaatgaagaactgaggcagttcttcatggagaacaccactgagagcgaagacactctcagtgcgaagacgaagaaggagcgctttgaagagcaaagctgggactcgttgaagacgagtccctactacgaggtcttacgggagtacgcggacgtacttccggaagagatccctgcggagcttccgcaggacatgggaattcagcacgagattgatctcgtgccgggcacgaagtactgtgtcacgcggcagtggccactgccgcgagagcaggtcaaggcgatcgacgacttctttgagaatcgtcgcaaagctggacaagtgcgggaatcgaagtccccgcacagtgctccgacgttctgtgtcaagaagccacagggcggctggcgcatcgttcatgcatacaacaagctgaacgatgcgacgataccggcgcagacaccgataccgcgaaaagatgtcatcatcgattcgatggccaggagcactatctacagtgctcttgatctgcgcgatgggttctatcagatcctcatgcgtgagagcgatatccctctcacggcagtgagcacgccgagcggcatgttctgggagtggctggtgatgccgcaagggctgaagaacgcccctgcgaccttcaacaggtgcgtgacgcacttttgcgctcggtgcgcgacttcgcaccgatctacttcgacgatgtgttcgtccacagccgggctgcggacgggatgagcgatgttgagatgcacaaggtgcatctccggaagctgtttgcgctcatgcgcaaccacaagctctatgcgaagctgaagaagtgcctcttcggggcgagcgagatacccgtgctcgggtgtctcgttgggaagaacggtgtccgccctgaccctgagaaggtcagagtgatcaatgagtggccgacaccgtcgaacgtcaaggaactgtggcagttccttggcttggccacgtacttgtgcaagtacgtgaaggactacgcgggcatgatacgcccgctgtcacagctcctgaagaaggacgccgagtgggtttggactgctgagtgtcagcaggccctcgatgcagtcaagcggggcttgactgaggcgctgatcttggcggtggccgaccaagatcgcccgttccacgtggtgtgtgacgcatccgacttcgcaatggtacatcttgctgcagtacccgctgaagtgactgcaaaacagacggcgcgtctgttcgttgacatggtgttcaaaccccatggcatgccgatcgacattgtgtcggatcgagacccgcgcttcactgcacacctttggcaagaagtgtttacacttcttgggagccaactttcgatgtcggatgcgaatcatccgcagacggaagggcagaccgagcgcgtgaaccgcgtgctcgtagacgtgcttaagagctacgctcactcgttccaacactggagcgagtgtctgccgacggcggagtttgccatcaacaactcgttgcatgcctcgaccgggcatacaccgttctacgtgaataccatcaggcacccacgccccccgagtctactcgggatggtggctccttccctaagtgggggaggatctacgactgcaacgcagcagccgcggaatgccgctgacacttgcacagtgtcagccgcaacggcacgaagcaaagccgagaaccgcgcgtctgtgcagggcacagacgccgacaagagcaaggagaagaagaagaacgtgtggtgaagcaccgaacaagaatttccaactgcgatgacatcaagcgacatggtggcagaacgataggcagggatcaggctgaggtcgcggatcaagagggtctatcgagagatctcaagcgattggataacgtggacgcgtaaggcaacacatatgtcaagacagattacgggcgatcgcgcttggactgcggcgtgattcgacgtagaaccaagcccggatcgatgaccaatctcgcagatctagggcggccgaggacagaagaggacggatcggcagcgcacggcaactcgcacaggtcatcgatcgggagttgatcgccgatcgggatcgatcgtggatcgggagccgatcgtggatcgccgatcgacccggatgggaagcacatgggggcgaagccagggcaagaatccagtaatcgtttggttgtaggatggtagatgagatggcagcggtagagagagaccagctaaacataaatcagaacgcaatttgcacagaagaccacaagtgccctcaagtcgtcaagtcccaggagctacattggcctcggcaagcgttgacacttcgggtagtgaactagcggtacggtggttaagactggattaatacattggccagcttgacctactctagtgatctttctctcgtgtgcaagtcctcgatcgaccggatactgcttggccggcgatcgctgcgtctctcaatcgacctcgatcccgctataggaagcggcaagcaactcaggaaaggaaggaacacacccggaaaggcaactacaggccttggatcaactccaggccgaccgatcgaagcgaagaaccctcgatcggagcgtatactcggacgcagagcgaagactaccgcgctgctccacaaactatccccgcgtcacgccaagacactcgatcttcaccaagtgctgcatcttcggagccccgagagagcagatccagcccgtcgacgggtagacaaggtgagaacaagttcagccgatcacggatcgttgggggaccccctccgttagtcggtgtctgggcgctggtgggaagctcgatcaggccttaaccagattttggccgatcccgctacaccacaaacgggtctgtgcagggcacagacaccgcgaagatgaacgcagaggccgggcctactgctagaaacgagctgaactcgttcaactcggacgcaatcaacttcgtgcagcgcagacaagccgtcattcggtttgtccaagacgctattgcagcttctgttcatcgacagaagctgaacacagacaatgttggtaggggcaacacaaattaattcaagaagggttcattggttttgttagctactcaaaacctgcataaacatgcagtttccgacttcggggcgagcaagctcgctccgcgcttcatcggaccgttcactgtgctggcacggcacggcaacgcctacacactggacataccgtctagtatgcgcctccatccgacgttctacgtcgggcggctgaagccatacctgcagcacgaactacgtagctcggctgaaccgaagcagaagactcggcggaagccatcatcctctccagcgcaaagtcgcgctcggccaagcgtgcgacgcgacctcccacgtcgacagagatgtccaacgcggtctgcgaggcctgagcgacttgatccctcaggatcgccacctcctgcttcagagcggcgaactcccggctctgatgctgttccacagcagcgacccgctcctcgagcgtcggaccaaggtcaaccccaggttgaccatacccggggcgtgttcccaccaccgccgcctccgatccgcgacgcccgcggctcaacacgctggattgttgagcgtattgtgaaccatagtatcccgaaaacgaaccggcagccggttcgttatcgtattcgttagagagggtttccgccccaccaagatacatgggagccacgggacgtcctgctgtaggacgttccggaaatggtgagggcgtacgaagctcaccacgcactgccgacgcgaaggtagtgcgagcgctgtggtcacctacagcgcccgaagtcccacgatcgtcgcgttcctcgcgtgccaagaacttggcacgtagatccttgagactcgcaggtacacgaatcgtcgtgtacccgtttaggtcgcggtcgctcaagcgcgccgcacccggaagacacaacgtgcactgatggccttcgggcacagcgcacggaataccagcgtccacagaggaactgtggagctgctccagcctcccgcgcgtcgagaatgtctcgaagcgctcacgggcatgcttaacccgctcacggtaagcggccggcttcttgttgaagttcaagatgtcttcttgctggagaagtatcggagctcgtggaagagcccgatgtaataatcgcgcctttgattcgttaacggatcagagtgctgctcctccgcaacagcatcgtcgtggataccgctgcatacgtacagcgggatttcgtttggaggcacagtgttgcccacacggtctgcgatctctgacgcagacggcatccacggatcgcgcgctgcctgagcagcgcgcggagggcttgaaggcgccacctcacgcgggaagcgtaaagccccagcagcagagagcggagtgtcgctctcgccgcgcgaacgcttcgagctcgaagcgtccgagttgtctccttcacgagggcgtctcgacccggcatgcgggtcgagactatcactgtcgatagactccttgcgcttgctagaagaggcctcgccctcttccatctccacgtcgtcgtcttcgtagtcaacggcgtcgctgactacggaagaaccttcgaggacaatctctggttaagttgtccccgccgcagccttggtagcaagagcgtcacgctttgctttgagacgctcgcggtactcggggatagagagagtatctatcccggcggaggacttcccctctgctgcagcgtcggtcttcttctgaggcgagctcattgcggaatgagctcgagttttctttctcccaacgtgaagaattgacgaatggtcaatttcctgattgacgtgccgtgactcggcgcgtctaaccttgagggggggatggtgtaacagggttacacacacaagtggctacagtcacttgtaactctaacagacacgacgtctgttagaggttcgaaatactttctcgaccttggtgtagacacaccaaaggctacatacatttacgaccaccacggcgggtggtccatagagacttatgattcttattggctgagagcagcatctcttagccaatgagcgacatgcatagcattggaattctgccaaccagccgttggcagattcctatcttagaatattacatttagaggaagtcagaaacataaaacaaaaatagcagttctcattttaacccaaaaacattatttggatcgtttatttagattaatctatactcggaggcccgagtataattaactctagttaaactaagcgacgcttcctcacatacacgcgcacaggtgtaagctaaagtagtgagccaaagtaggcccactacacctggtagcacttcgtagtccgtccaacgaccgactacctgagttcgtacgtcatcgcacgaacgcggaactgagaaccttcccatggatacagaggtgcccatggaaaactccactacgcctgcaactcacgttgcacgcgctgactgtccccacctgtcggacccagagtgggaagctctccaacgactgtcaacagtaattggtgaggcggctgtagctacgatgctgcgtacgctaacgccgacagagcaacatggtgttgctctgggattcatcatgagggagcagcgagatgctgcttcgtctaccacggtgtcgtcggggacgacaccgcgcgcgcaatcgctgaagctcagcgtgagcaattacgttggaagagagggcgagcctctcctccgttggcttgtcgaacttgacactgccattgcggctcgacgcatcgtcgacccgttgtcgaaggtcacgttcgccatgtcatgtcttggcggacgagcgagaagttgggcgtatggacgccgagtctctgatcctacgtgcttcagcacgtacgagggtttcaaggaggagctcaggcaagcgtttgagccaccgcgaaacgagttccggtcgagggcggagttcctcgacctgcagcagggcaagcatgatgtccatgcttacgctcagagagcacggtacttggtctcgaacatcgtgaccaatccgatcgacgaggcgaccaaggtcgtcacgttcatgaaggggctgagagatgggcctgtgaagacctatctcttccgtgagtacccgagtactctcgaagctgcaattactcttgcaatgcaggaggagtttagcctgcggcaggctaagctgcatgcacatgtgccgaggccacagccacgcccggtagtgaggacgggaggcccagaacccatggacctctcgagtgctgcaactgctgggccccagcagtcgcagggaaacaatgtgcgatgctaccgttgcggtagagtcggtcactttgctcgggagtgcacggctcccgtgcaccagcagggtggctatcgcggcggtgccgggcaccgtcgcaaccaaacaaaaaacgctggacgccagtaggcgcggggcgccctactggtaatgcagttccgcgtgtcgaccttggacacgcgacactaaggactgcagcccccagtgaggttcattctcactgcaagaaccaagatgacaagcctgaccttgtcatcctgaatgtgaactcgatgagagcaagcggctctctccgtgctttggtagattctggcgcgtcggagaactttgttcgactgcgaagtctatcaaggcttgacttcgaggatttaaagatatctcgaagtatgttgaaggtacgactggcaacgggtgccgtcgtgaagaccgagaagcgcatggtacgcgtgcgcttcacgtatgaagatcaagagtttgtcgagacctttaccgtcctggatctggacgataagtttgacattgtattgggcatgccatggcttgcacggcatgatccgggcatcgattgggagaagcgcaccctcgtgcgcttcggtcgcgacagcggaacagtgagcgatggccctgttgccgctacgcacgcatcgacaggtgcgcgcgactccccactcgagccagcgcctaatgccgctgtcccggagcgccctgggtgcgcgcgagcacgcgggcaagagcagcaagcgtcggcgtcgccgccgacggctgaaggagaaaatgtgttgatctcggaggctgacacccgcttttcagcgaatctggaagagtctccggcctcatggggcacggatgatgcaggcgagtttcacgcctcagccgtggaggctgacgcaaatttgattggatccgttttggccaataataagagccaaggtgacgtaacgccgtctactccgggagtcgatggattgtgtggtgtagtagcacgcacaaaatcgtcagatgtggcaccctagctacaaacacaacaacagccgagctagtcggcccttgttggcctgcgctgagatgtcccccagcggttcggcccttccgggacagtgatgtctcgtcctcgccgagaccaagtaccccaagccagtcaatcacggaagccagctgagttacctgactccggaattagaaatcccgtgccctccgccaaaggatggacgacggccctcgcgggcttttacgggtcgccggagattgaccgtctcacaggagaggtccatagaactgattaagcatcttattgagggttgctggtcttgggtactgtgtaccagttgtacccattaaccggttaacccgaaccggtccaatccgaacccacgttgattatggtgaatacggtaagttgtttacgccaccgatgattagacgagtaggatgattggatgaacaccggtgagtgatggttgattagatgcactaggtgataggacgcagggtcgcgtgtctataacagtagggtgtaagctccaacaattcaatcactttcgaatcttcattctacccctcaagtgccttcgctccggtcccgccatctgcgacgtccctccctccgcttcgtccgagcttcgtgtccaagatccatactttccatcaggttatgagcccaagcaccatgtcctctgcccaagacgcctcgaccaaggtctccattgacaagttcaacggggacaactacgcgacgtggaaccgctacgtgcgtggcgtgttcctgaccaagtcgacgtggcatgtcgtgaaccgcgagacgacgccgagcttcacggactcgcgggccaaggacgactacgtcaagtcgagcaacatcgcgttcggactgatgttgctccacatggacgcggactaccaccatgtggtcgacgactgcgaggaagcgtgggttgcgtggacgcgcctgaagacgctgtacggtggttcgcagaaggctggacgcatctacctgaagcgccaactcttcagcatggagatgtcggatggcggcaacgtcttgcatcattgcaacgaggtcctcaacatcagcgccaagctcagcagcatcggcgccaagatggaggatgaggacgtggcgatctgcctgttgcgcagcctccccaagagctacgagaacgtcgtgctgaacttggagatgagcagcgctgaactacgatcgcaagacgtcgtgaaggtgctgacgaatgagcacatcaagagacaaggcgagaagatggcgacggtgaagacggagaatgcggccaaggcgttcaacaccgaccgagagtctcgccagtgtacgaactgcgggaaattggggcacacgattgacaagtgctggaccaagcagaaggacgagaatcggggcccaagacgcggcggcaatggcaatggccgtggacgcggggccaacaatgcccagtggaggaacgacgacgccagctacaactacgactacggctatgatcgagtggcgttcgcggtctcactggagtgtggcatttcgacgggcaagaatgtgtccgggttgtgggcggttgacagcggcgcaacgcaccacatctgcaacgacaaggccaagttcgctcatttgattgagcggaatgaaggcgaactttcggtggccgacggcaacaaggcggccatcatgggtgtggggaccatcgtggaacgagtggttctgcccaacggcgacgagcgcgacatcgagatcaagaacgcgctgtacgtcccaagcatgagcaagaatctgctttcggtgccacagatcaacaagagtggtctgttccaagtcgtgttcgacagcaccaagatgcagattgcgcacaagggctccaagcaagtggtggcgacggcaaacctcgtggatggactctactggctccagacgcctcagcgatcggcgaatgcggcgaccagtgggaagacggtcgacttacacgcgcgtatgggtcacgctccggtggaggtgcttcgcaagatggtcgacaacaacatgatcaaggacgcgaaggcaccttccaagtcgagtggaccaagcgtgtgtcgcggctgccagcaagggaaaatggtccagaagccgttcccaagcaaccgtgacaagcgtcactacgacacgttcgagctgctccacttcgacgtgtgcggccccatggaagaagagtcactgggtggcagcaagtatctgctgctgatcgtggacgaagccagcggatgcatgaaggggttctgcctgcgtgccaagtcggagagcgaggactgcatcaagatgtacgtcacgaaggtgcagacgcagttcggcaagaaggtcaagtttgtgcggcacgacggagcccgtgagttcgcgaccaactcgctcaaggccttctacgaagtcgaaggcatcgagcagcaaaccacggttccgtacgcgcaccagaccaacggcacggcagaacgcgccatccggaccatcgtcacgattggccgcagcatgctgcatcacgccaagctggacaagagcttctgggctgaggcggccatgacagccatctacgtgaagaatcgtctgccatcacccaagatcgaacacaagactccgttcgagatcgtttacaagtccaagccgagtgtgaagcacatgcgtgtgttcggatgccagacgtacatcctgacgccgaaggaaagacggcgcaagtgggaccccaaggctcgcgccgggctgttcctcggctacgaagaagtgtccaaggcgtatcgagtttatgacatcgaggcggggcaggtggttatcagtcgcgatgtcaacttcgatgagtcgacctttggactttcgacgcatacttcggatgaagacgtcgatgatgctgtgctggacttggacgcgctggacctggacgacaacgatggaccgcgccaaacgagcttcaagcaggcggggaagcgcaagtaccgaccgagtggcgacgacaacactgccagaagatcgcgccccgttcgccaccgagctggcttagaagaagcaagtgcgccggacgtatcctcctcgcgccgagccgaccccgacgaagaagaaaagtctggggaccaagatgaagacgacgactcgacgcctccagtgttttggcgtgccagtgccaacgctgtggaagcagcagccgatctatcggagccgacgacgttccaagaggctgtgaacggtcctgatcaagtgcactggcgcaaagcgatccgcgcggagctcaagtcgatgcgactgcgtggtgtgtttcgagctgccaagttgcctaacggacaacgcgccatcgataccaagtgggtgttcaagatcaagcgcaaagcggacggctcgatcgagaagtacaaggcgcgcctcgtggccaagggcttcaagcagaagtacggcattgactacaccgagacgttctcgcccgtggtcaagtatgtgacgctgcgcatggtgatcgcgattgctaagtattttggctggcccctcgaccaactcgacgtggtgacagcattcctgtacgggataatgaaggaggtggtcttctgcgtggttccggaaggcgtcaaactggatggtgacttcgactgcctggaactggtgaaggccatctacggtctcaagcaagcttcgcgagtgtggaacgagaccttcgacgagttcgtgtgctccatcggcttccaagtgtcggccttcgatccgtgcctctacatcaaggtggtggacggtcactgcgtgcttgtactggtgtacgtggatgacgtactgattaccgggagttcgcccgagctgatcgcacgcacgaagaccgacctgaagacgcgcttcgagatgaccgacagcggcaagtgcgcgtttgttcttgggatcgagttggtggacggcccggacggcagcgtgaccatgtgccagcggcgatacgtggacgacatcctgaagcgcttcgccatggacgagtgcaaggccgtggtgagtccggtggacatgagcactcgactggttccaagcgacgcggcgaccaaggtgaacgctccgtttcgcgaagctgttggtgctctgatgcacctgatgaccgccacgcgcccagacatcgcgtacgccgttggctatgtatcgcgcttcatggagaacccccaagaggaacactgggttgcggtcaagcgtatctttcgatacctgcnnnnnnnnnnnnnnnnnnnnnnnnnnnnnnnnnnnnnnnnnnnnnnnnnnnnnnnnnnnnnnnnnnnnnnnnnnnnnnnnnnnnnnnnnnnnnnnnnnnnctgcaggttgccctccgccaggtgaatggggagctggatcggatgcgtaccgcccgagataccgcgagagaccaagccactgctgccgtgaaagacgtcgatcaagctcatcaggaccgcgacgttgcgctccgagagaacgccgatctccgtacgtaaactttccgtgtcgcctattccgttgtcgatcgccgctcatgccgtcgctgtgttacaggatcgtgtctccaaagcgcgcaacaagtgatccgtgcccaagacgcccaattcatcgacgtccaggatgccttcgctatattgcggcgcgtcagcgatcgatccaacgaggatctcgagaatgtggccgacgacgccttatctcgcgtagttcggtggattggacttcgccagtgcgcgccgaccacgcctgtccgttgtagccgcagtcgttccggatctccggactccgtcgggcacatccacaaacgtgtccgatcggcgcctccaccacgtagtcggtctacgagccgatcgcccgctcggtctccctcaccttccttttcgttacccggccatgacgatgaactccctgctgggggtcagcctgccgaagatcaacccgcaaagaaggtgcctgctgcagatcaaccgccttccgatctgaacgatcaagagagatcggaccaagaagaatcaggttcgccccctcgatctacgcaggaagaccggtcggaagaggaggagtcgtctccggcccgatccgcggccgacgaggcaaattccgaatcggaggggcccgatcaagagaccaacgaagaagaagacgagtcggaggggtctgatcaggaagctctcgcagccttagctcgatcccgatcggaggctcgccgccgtcaatctgcctcgccgacacttcgccggctcgctcgcgatcgcgatcgccctcagtcgtgtcgatccactcccaatctggatcggttcgcttccaatcgtcccacggaacgcatcagtcccgtcatggctcacctggaccgacgcctccgggatccccgcctggttctccacctggatcgccgccgcccggttctccgcctggatcgccggggcgtcgtcctctggtcccgccgatgttcccgatcggtaccatgatcccgggtttcaacgcccccagggcactcgctcagactgatacagacccctggccttcgatcctgctgggacagctacagatcaccggcatgatcctgacgctgacccaccatctcctcctacccgggggctggctcttcccgctcgtcgttcggggcattgcacagcctgcggccggggttggctatcgagacgacctgatcaccggacctaagattaccgcgctgatggccgatcgcccctggcaggtgctgcagaacccggccgatccgttgactttcgatctggcactccatcgaggcgccggcacccgattgggtcggatcgccactgcctatcttcagttcgaagagcagaatcgccaggccttctggaaaacaactcattatctcccgatcacgggcgcccaggatcgggatcagatcgtcgagcgataccatcgcgatcgtcgtgcccgacggatccgcctcggtgattggtggcgccgactcctcgtcgatatgctttcgatgatgcgagagatgtgggcagacgtcgatctgttgctgggcccattcttcctgcagatcccggtgcgacagcgtacgctgtgacctggtatcctggcgtggtatctcgcgctgcgaacatcggcaaccccacccaacaccatggcgaaccgaccgacctccgaacggccctgatcgaggccgacacccaagatccctggcggaaccagtaccgcgcccacccccaggaccatccagcccagcggatcccgcgtctccgcaacaagttcaaccccaacgtcagcgcccaacaccagccgtgacatgatcgccgtctccacgatcgacttccgcgaatagcgagccagtcgaccatcacaccccaagaataggagtggcgcggaggctgatcttccatacgcgtagcgcgaagtactcagattgatctattccattgtaataatccacatttttccttgatcttccactgttccccgtcaatccattcgttgttaattcgatcggccaagatctgtcctcatgccttcctgtactcgctccataaccgtccgatctgcactcacatacactcattcattcatatacaaccctttcctccgatcaacggccccccccgtcgatccgtcatccctctcactcaccaaggtgacccgctcaccctggtggcccgatctcactcctcctcgtgagactgcatcgcgccgaatcggttccggtacacgcgatctcgaaggaactcgtacaataacgctccacagttgagatcagcttcgtcgacccagtcaggctcgtcgtaacccttccagcgtaccaggaattcacgataagtccggccgtaccgtgtccttcgacccgtccgcatatccgtgatctcctctatttcgtactcattcgcatctcgatctggggcccagctgtcctccggaagtaagacttcgtcgaaatcgagtcgaaccactgcgtccaccgtgagcgcgatctgcggtcgatcggggaagtccctgaccagcttcagcttcgagacatgcacgatcgggaacaggtgatagtccgtaccagcgatctgaagcttcatcgtatactcgttcaccttctccgcaacacggaacgggccgtgccacaggtgggccaacttccgggcatagccctctttcactcaatccaggtacagccacacctgagatccagcttcgatcgagtgcggtcgaacttcttcattgtgtcggtcggcccgatccgcgatcgcctcgcgtagtcgagcattcacctgactccgagcctgatcgtagtgcttctggatccgataacgccaccgtcaaagatcccgatcccgagtccgggtactacccaaaggtatcgttgcctcgagcgtcgatcgaggatcccatccatgcaccagataaaaaggggagtccccacggacccgatcctgagccgtgttgatcgcgaaggtcaatcgctctgcgtactcatcccaatccctctgatccagatcctccacgaacatcttcagggctctcgtcgccgtctgtaccattcgctctgcagtaccgttagcctgaggtcgatatgccatcgtcgctcgctggcgcatacccaggatcttgtcaaaggcgcggaagaagtcagccataaatcccggctctcgatcgtgcctgatcacctcgctagcaccaaatcgccggaacacacactctttgtaagattcggcgatcatctgcgccgttcgggaggaactggccttcgcgatcacgtatcccgtgaacagatcgacccagatcaacagttccgttttacccttgtacgacttgggtagcgaaggtatgtgatccatcgctatgatctggaacgggtatgtcgcctggatgtttcccggcgactcgcccctgatcgtgggtcgtcctttgccggtctcgcagtcgacacattcgccaacgtacttctgcacacttctgaagagacctctccagtgaaagtgatcgcagatccgctgataggtacacccgatcccctggtgtcccccttccaaagtggagtgatagtgatgcaagatatcttgatgcagcgtctctggtgcaaccagcctcatcagaccatctcgatctgcctccgatcgtttggagggcgggcaatagaacagcagattatcaccgtcgatctcataatccgctgcgatgttgccatagggtcgagcctcatcctgcgtcagttcagccacatctcccatcaggtacttcttcatacccgcgatccacgtttcttcatcctgtgctcgacgaatccgatcgatccgcaaccctcgcacgatctcctcctgcatgacggtcgggttcggccgtgatctggtgcccgatcgggttgtcatcggcgatagtcgggcgatcgactcatccgaccggacgaccaggatctcatcaagtcggttcagtgtcactagatccccatgatcggcatcctcctcgacgacgacgcccccttcacgttggagtgctgcactggccaggctgtccgcacttccgttccagtctcgtttcacatgtaacagctcgtgatctggccagttccgtagatgatccagcaccttctgcttcaacaatgtcagcttaggtgctttgcagtcaatctcgccccgtacttgtcggatcaccaggttggagtcaccgcagaccactaacctgcctcgatctatgccgtccaggaggttgaaacccaacaaccgaccatgatactccgcctcgttaacagtcagcccttcggcatagcccgatcgagccttcaccacactccatcgggtaacatccacaagattgtactgtacgcgcccccgcctcgcttgacgcgggcggatccatcgaaactcatcaccagcagctcttcgtccgcacgcaccgtcgggatcggggcttgaatcttgcgccggggttctttcttcggcgcgatcgcgatcaacgcgtcgtccagatccgatcgaggcgtaatactagcggcgatcgcccccaatatctcgtcctcatccttggtgcacttcgtgatctccagtgtccagggtgataggcccaatcggccttgaagaccggatgatcggaacagccacgccaacgtcgagtgtcgggtcaagacccggatcgatcgtccaaccagcatgttatagttcaggtccaggatccgtaacagcgccagcacttctttctccgccacattgtaattcagttcattcgacttcagcgttcgactcgcgaaagtaacgggatgatagatctggtcgtgctcctgcatcaatgcggccgagatcgcccagtcactggcatacacaatcacgaccggagtccaatcgcaatcgaagtgccgcaggatcggtgtgtcgtcgcgatcttcatcttcatggtcgaaaaggcacgatgagcacggatccagcggtcatcggcaacactgacttcaggaactgatggagtccgatcggggctcactgggtccgtatccactaagttcggtacttggcgatccaggatctggcgcagatcggggcgtttcttcagcacggcgaagtccacctcgcgcagttcgtacaggatcgccgcgtatatcgcgtaatcttccaagaaacggctgtaataattgagactgcccaaaaacgattgcatcgatctgagcgatccggggaaccagatcggtcagagcggtgaggtccttcggattggcttccagcccgtcgttcgacacacgatgtcccagatagtccactttacgcattccccaagagctcttctccacactgatcgagaggttccacttatcacaagcgtccagcaggtgatccacacgaccgcacagctcatcccatgatccggacgtccctaggatgtcatcaatgtacgatctgcgacctagcactgatggacgccccggatcttctggttctcctgactcaatcaagtccgtagtgacttcacagtccgacgatcgcgggatcctggtgaacccatacaacgcgtcgtccagaagtcgctgataggtgtgaggagcgttcttcaggccgaacggcatccggttccactcgaacagacccatgtgggtgataaagaccgagatcgcacgagctcgatcggtcattgtcaccacccagaatccactagccatgtccaaggagcaataccagagtaccttgtccagatcctccagcagatcgttgatcaagggcatcggatataccatcagcctggttagactgttgacgagccgataatcgatgcagagtcgaatgtccacgccgtccttcttgatgatcacgacgatcggcgaggcccacggtgatcgagattccgaatcatcttggctgacaatagtcccttgatcagctcggacaccttctccacgaactgaggggcaactttccggacacgttgagcgatcggcttcgcgtcgcccacgtcgatgtcgcaggtgacgccccgggctgctgggggaagtgcattgcccttgccaatcagcaggtgattcttgtgccagatcttctttcgcagccgatcgatctcctccggggtgttgaactccagatctcccaccttgatatcatcgatcttcacctcatccgtcgtcgagatcacaatttcaagaagcacagctaattcaccttcgacatcttctgctgacagatttccgccctcgtggtaatggacctgatcatcagcgcccacgtctcgatccggttcggacgtaacgagatcgccccgatttgaagtgggtttggcctccattttcagctgatcacctccaacgatcgatgagtctttagccacttgtggcagtcgttcagatgctggaacaccgtcgactgctgtatcgtcacttgatctcgactcttccacagctaagaccgcaacggggtgtgtccgatcggtactcccgcctcaagatctggttcgacggcacaaccgtcgacctgatcggccgatggcatgtgaggggacacgatttcgcccttctcggcggctttaccaccggaatccacatgatctggcttcccctctagatcgccaacacgatcctcttgcggcttcgcgtcatctaccggtgcacacgcttgatccgtgaccggcgaaggctggaagtccatctccgcctgtttccgctttggagagcattccttctccgatccggaaggttcccacaccgactcaacaggatccgatcgtgggtctggtggatctccgacgaggacagttgaagcagacgaccccgactcctctgtcacgcgatcatcgtcctgcaacggtctgccccctgatctaagagtatcaacgactgccgcccccggatcagggctcattgcctccggttcgcttgttggatcgggtggacccgtcgactgatcgacgatcggggatacctggcgtctctggagaatggctcggggcgttgaataaatcggtcgctcgacggaaggtaccggaggtcccgttggcgcctcctggttcgtcggccggtcatctgttgtggcttgaaaggctagatcctgccattccatgtatcgacgagatgagtgctccggcggcgcccttcttcgaccctgtgattccgcctgccggaactccgtctggctggcggcagcctcgctacgctccttggcccaagcgggtacgacgtctccgccttcatctcatcaccgtgcaggagttgcgaacgctcttcctgccgccgcccggctggatcattccgcgccgtgttcctcccgcgcctgcgaactggaaccgcgccctcgtgactctggccaacgtcgacgcgctatacgcgactccgccatggcgctacctcgctcaagccgctgaggcgcttctcttcgcgtccagcgacgcggcgttccgcccattcctacgtcggctccggcaccacatcgagcactgggctcaggcgtactgggaggccacccatgagctcttcgtgcagggtgcggcgtggaaaaggtggcgcacggcgcgcaactcgcgtcgctcacacgcgggcaaccacctcaacagcctgttgcagctggtggtcggactgttccagcaaggtttcgcagacatggacctcttgctggacccaatggtgcttcactttccgcccgcgcacacgtcgatcggacggtggtatccaggcctcgatgtcgcgcaggagccctggcgccggttctatcggacgccgctcactgtggccgagatggacgccaacgtacgctgccgagtgacgcgcgatcacccagccttccatgtgccgcgtcttgcaggtaagtttgtccagcaggtttgagtcttggcccatcgttgcagtccgtcgcgtttagttgttgtagccgtaacttcaatacgtagccttgatcttttcccttgtttctttccacttctccacatcttttatgagacggccctccgccgtcccatcttcagcaacaggctggtcctcctcacttccctcatccaatccctcgctccggccattcccagagtcgaggcttcccaccagtcctcccgtcggcagcccccccccgccgacttagtcgcacccgagggcgctcacccaccaggctccaccacctccgcgttctcgtgcgactacatcgcctcgaaccggttgcgtcccgtgcgctggcgcaggaagtcgtacagcaacccgccgcaattcagatcgagctcgtcgacccacgtcgtgtccgggtagcctttccatttgacttcaaactcgcgtcgcgtgcgcccatactgggtagcccgcccctcgcgcacattcacgatcttctcgccctcgaagccgtcgtcctccagctcgcgcgtggcttcccagctatcctccgtcaagagcgcctcgtcgaagtcgaagcgctcctcgaccggcaccgtcagctgcgtcgcgggtcgcgacgggaattcccggacgggcttcagcttggagatgtggacgacggggtacagcggatagggcgtacccgtcgtctcaaggcgcactgcgaacgcgctgaccagctcggcgacgcggaagggtccgtgccacatgtgcgcgagtttgcgcgcataccccggcttcacccgatccaggtacagccaaacttgcgatcccgtcgcgatctcatgtcgcgtcgcgttttcagtttgtcgacgcgctctctcttcgacggcctctcggactaactccaacgcttgtgcccttgccaccttgtagtgtcgctggttacggagcctccaccgcctcgcctcggcgtcctgggtcgacgtgttcccgacggccaacgccgcttccagcgtcgaccgaggatcccagccgtgcactaagaagaacggtgtttcattcctcgtccggtcgtgcgacgtgtttagcgcgaaggtaagacgctcggcgtattcctcccagtcgcgttggtcgacgtccgcgatgtacatcttgatcgctcctgtaaccgtctgcaccatccgttctgcagcaccgttggcttggggacgataagcaagcgtcgctcgctgtctctgacccatgagtttgctgaacgccttgaagaagtcggacatgaagcccggctcgcggtcgtggcggatagcctcgctcgcgccgaagcgcctgaacaccgcctcctcgtacgcctcggtcaccgtctgcgcggttcgtgatgcattcgctttgaccacgacgaaccccgtgaagaggtcgacccagactaacagctctgtgttgcctttgtaggaggccggcaacgacggaatatggtacatggcaatgacctggaacgggtacgtcgcgacgatgttgcccggcgactcgccctggatggtcggccgaccctttcccgtctcgcagtcggtgcattcgccgacgtagcgctggtcgcttctgaagatccctggccaatggaagtggcgcctcacgcgttggtacgtgcggccaataccctggtgtccgccttccaggctcgcgtgatagtggtggagtacatcttcccgaagagtctccgggatcaccatcttcatcatcacatcgcgatcctcggcggaatcgtcgcttctcggctggtagtagagcagcccgccttcgccctcttcgtactgaggcgcaagcttttggcagttcttcacctcgcgccgagataggtctccgacgtcgccgcggagatactacttgaggttgacgatccagacctcttcgtcctgggcgacgcggatgcggtccaggcgcagtcgttgtaccaccagctcctccaggacttctggaggtcggaccctacgtgttgtcgtgcgtgcggcagccgagcgcgtcgtcaccgcgaggacttgtgctgtcccgcgtcccgcgtccatggccttcccggcggggtcatctgcgccgcgcgttttcgcgtcgcgattttccgagtcgaggttttccgcgtcgagattatccgcgtcgggactggctggagacgccatctcgggactcgatgcccgtggtcggatgacttcttccaagcgattcagcgtcttcagatcttgaatctcttcgcggctgtgcgcgttgcggcctccttgacgctgcagagcttgtccagccagcatgtcggcactcgcgttccagtctcgtcgtacgtggaagagttcgtggcgcggccatgcctggagtgcgtttcgcgtcttttgtcgcagcagcttcagccccggggacttgcagtccatctcgtcccgcatctgcctgatgacaaggttggagtctccgcatacgacgagtcgggtgacgtcgtcgagttcctctagaagagaacatccgagcagcagcccgcggtattccgcctcgttgaccgtgaggtccgtcgcatatcccgacgcggcgcgcacgctggcgtacacgatcacgacggattctcggttcgcgtcgaagtgtttcaacattggggtctcggcgagttttgccttgagcgcgtcgaaggcgcgcgtcgcgtgcatccacttctcatgcccgcggacttctggacgcgtgacgtactcgttgaagtcggtctccgtcagcgaatacaccgtcgagttttggctcagcgagttccgactccggcgattcttccatcccagcgcttctagccacagtcggaggcatatcgggttcgctttccaccgcctcctcgtccgtatccggcttgtggtcgtcgggtggcaagtctaccccccttcccttcggcgcttccgcgacagccgccaacactggggtcacggcgcgtcgcgtcccgatttgtctcggctccgggcgcaagatggctttcggcgtcgggtatgaggggcgatccgtcatcggtccgtcgagctcggctgggatccagttctcctccgcgtcgcgcgtcgcgccgtacgccagattctgccactgctggtaccgggtggagcccagtcggacgaatccacggttccgaggctggccgtcagacggcgtccactacccaagcgtttcatgcgcgtcgagggttatcgctgcgtctccgatgttcgtgacacgcaggtacgttttatttccgactctccccttgacaaaggtagtcacccacgactctgcccgtgtcacccacaggaacggtgcgtttcgatccggcctcagcaagacttcatgcgtgtctcctggttcgagcctcacaggcgtcttgacgtcgaccgggtgcatccgtgcggcgtatagcggttttcgtccgatcatctggctatgcacctcgtcgggaaggcacgccgtgccgtccgcagtgtcgatgcgcactccagcgggcaccatgaagttcattcccaggattgcgtgttggccgaccaagtcgccgacccacaggtgcatgtagtacaccaagttcccagccaaggtaatcttgactctggttctccccaccgtgtaatatgtctcatcacgaattcccacacactcttgcgtgatcttcgtgtcaatcaggcagcctacctcacgagcaaaggtggtgtccaggatggacacctcggcacctgtgtcgagcaataacacagcacggcggttgttcagctttccatgaatcttggcctgcttgtaccacttgtgcggcgcgtaatgtttccagtatccgcgtcgctctcctggttgcaagtcgatctcgtccaggggtggttcacgccgagccgaatttcgacgaggcgaaacctgatgagcaggaggaagacgacgcggtcctcatccacgaggggtccgacctctttgtagaggatctcgagtctgagatggcagtgctgccagacctctcgctgaccgccgaggtgaagatcgaggacttgaaggtcggcatggcgactggactcccgcccgaggaagccgcgagacaagaaacgcggctacaccaaatcatctggaagcgacggaagtggttgatcggcaaaggcaacgccttgccgccggccgccctgggtgttgtctgcgacattgacgtgggcgacgcaaaacccgtcgcgcaacgcgtccggaaaatcccgccgcagtttcgagagaaggtcgccgacttaatcaaagggctgctgagcgcgaggatgatccagaagtcgaagtcgccgtgggcgtcgcccattgtcgtgatcataaagaagaacggcgtcgatatccggctttgcattgactacaggctcatcaacgggctgacacagttgatgatttaccccatgccgctcgtcaacgacttgctcgaagacttggacaagaatctgtggtactgctccctcgacatggcgagcggcttctgggtcgtccccatgacagaccgggcccggctcatctcagccttcatcacgccgatgggactgtacgaatggctgcgtatgccgttcggcctgtgcaacgcgccgcagatttaccaacgcttgatcgacaacgcgctctacgggttcatgaagctgtccccggatggcagcactcgggacgtctttgaagacggcgaaccggtgaagccagatattcactccattctgggacagaggtcgtacatcgacgacatcctcatcgggggcacgtcgtgggacgacctgtgcgagaaggtcgaacacttgctggatgtatgcgagcagtggcacttgtccatcagtgtcgagatgagcgagtggggtatgtccaaggtcgactacctgggccaccgagtctcaggactcggtctcgaggcgaagccgaagaatctggagtcgctgacgtcgctcgagttcccgcgcacgctcaagggcctgcaatcgttcttgggtagcctcaactactaccaccggttcattgcagactttgcagtgtatgcaaccgctgcaaactcgtcgtccgtcgtccgtcgtaccgccgagattcgcggcgcgcgttcttgcgtggtacgttcgaggttggattcacatgtattatcattcagggaagtcgggctctcactaaccacctctcgcgacttcttggtcacatatgcatagacggaaacaggtcgctcgtctcgtactggtttccaagccagcgagcgtcctagtttaacatcttctcggcggccggcggcagcattcccgcgtgtttattcgggtcaaaccactggcgcaattggttgaagaactcctccatcgggcattctccggcttcgtgcacgtcaccgcaggccttgcacaccctcaagcatcgctccgtcgggtgctggccaccacacttctgacacgtcaacaacttccagcagtctccttcgacatggcgacgtgaaccacagtggcggcaccgcgggcggtcgcgtcccgagtcgtcgggatcgaagttgcgacgcgccggctctcccggcggggcctgtcccgcgacgaacaacttggcgcgttcttcgtccgcctcgtcttggtcgtactggcgatcgtcgctgtcgcgactttcgcgtcccgaatcgtactcgtccgacgcgacgtgaatcgcatgcacggcgcgcgccggctgagtcggtggggtcggcgccttttggcggaacttgttcgagccgaagagagtctttttctggtgggccagtccccgttgtcgggcacgcagcttcttctccagcgcctcggagtcggcgacctccatcagcgtgagccgcgaggcgagttcggcctcctgcgtgttcagcgtccggatgaaatgctcgacgtgttcgcgcttctcttcagtcgtaccctcggcgtatgcgatgttggccctcaagcccgcgacgttgagccggtacaagtaatccagaggggtctcgtcggggcgctgagccgcatggtagtagcggctggccattgacacgcccttgccgcagtactgtacacggaattgctccatcagctcggtccatgatttcttgaccttcctgggcaactggagataccattggcgcgcagggccgctcattagatcgctgaactgcccgcacacttcttcgcccgtcatcccgtcgcgccgcgcggcggacttcagacggttgagccacagtctggctttctcttcgctggcgtcccgtcccgagaactctttcagctcggaagatgctgagaggcgtacgcgggcgagggctacgccgccggctgtcgccgtcgagacggcggctgcggttcttggcactccgatgtccaagtcgaacaggtcatcggggtcctcgtctgcgttgcgtctagttctggacctcgtcgaagaacgcgaactgaccgactccatggcgacatccgctgcctcctgggggcgagccaccgtgagtgtgggactcgcgggcggcttcagccccgtcggaattgcggctgtgtcggcgcgcggggcgctcatcactgtcgtctgcatcaacttgatgatggattctctcaaggccttgggaagcacctcctcggcgggtttcgtcacctccgtgcgtgcgggcgccgcggatagttgcatgacgcgcggcggccggttcatgggcatgcgcttgggcgactcgaaactgctgtcggagtccacgctcgattggtatcgaggtggaggcgagggcgtggtcgtcgaggtctgggctgagcccgtcgaggaactcggcgcgtcttggcccgtcgcggaactcgtcgcgtcttgtttgacggatccggcgagaatcgtcaagggctcctgcacgacgcgaatcgcacgtaaccaagatttgaggtcccaattgcacagcctctccatctcgaaagccccagcacgaaccccgagtcacgcagcatctggaagagagtcggcgcggcgtgggcgacgctggtgagactatcgaagtccggcgccacgaaggggcctgtgaagttgctcatcagcatgggcttgaggaagaccaagattgggtcttgttctagcagacggaagagctccgtgcgcgccacgacgtaccgtatctcctcgacggtgtactgacgtcccgtgtccttgccttgcggcttggacagcgactcctccgccgagtccggcgcgcgcagcttcttctgcttcctcttgggcgacttgcgcttcgtggctgccttggcggtgggttgttgttggtcgtcagcctttgcaggcttccgaccggtaggaccgcgacttgcgtcgcggcccttcgcggccccctcgtcgggagccgcatcgggaacggcaaactgttcttcgtagccctcctggtcgtcgctggccccgtggcctgtcgtgaaggttccctcagagctccacgacgcgacaggtctctcactgtgctctcttgtggtcggcgaccttccagccgactgcgcacctgcctccgatgcctcttggatagttagcccgtcattcgaagtagtactcccgggtcgcggcacgattgtggagtagcgccctcgcagaaatctcgcgaatgcgatctcgcataaactcggcgcgtctggatagcggtcgcgccgagcaaattattaccggttgttggagtagcgtatcttcgaaatacaggcccaagtcttcgcaggcttcggagttgggggttcttgtgttgacgcttgttccttgtcgtagggcgtcgagccttgggcgtgcggcgttatcgggccggcgtttcctcggcgttcccgtcgggcgtgcggcgttatcgggccggcgtttcctggggcttgtgtggcgttatcgggcctacaggggggtcttgtgcacggcggttatcaggccagtgcggtccttcgcctaggcagcgcgttatcgggcgcccacctaaacggtatacgtttaacgtgcctttgttccagcacgggtctgtggggggtgagcacccgaaccagcaaacgacggagggccgcgatattgaggcggctctacttgccggcgcttggcggttcccctggaacctcggagaagacgggaggtctttgtggttcagagaaatttcgggactgagtccttaccctatcctatgtccttgctactggctactctgtactactgcttgctaagcctaccgctctgggcctatccctacttccgtcgtgcttgcactgccgtccttcaacctggtttgcgtggcgcaatcaagatcttacctcggcgcgttttggtcggcgggggttagggttggcgcgttttgctcggtttagggtcggcgcgttttgcagaaccgggtgcgctggtcgacccgtcggatgattacgtgtcgcactggattctggcaccgtgtctcacggcccatcacccacgccgactttcccgtcgagctcggccctgcgtcgcgcccatcaatccgcgtcgcgttccatcagccgcgtcgaagtccatcactcgcgtcccggcgccttcttcctccagcgcccggcgcgcccacttcttccgcggggtactacaccacataggcatctcgaatttaaaggtgttattacgctatcgacgttgaactggctgttgtacatcgagatcgattgaacagcaacctcaacatttttgaaattagcagaagctgggaagctataacggtactgattattgaaagaattggacaccaagtccttggagctgattgctactagcgaactcataattgattatattcgtagcgggattgtttgattcgagtatcgaaattaaatctcatctcaccttcaccgaatctatgaataaacactgcacctttttggctgttacttgctcataggctctgatgagtccatcctcagtcgtgccagggatattgaaatccttgaacagcatcttcaaatcgcgcttcgaattggcttttaggatcgctacatattctgaactcaacctgatcatcttagggcaagcaaagttcagatggtttgcttacctatgactacgcgtagacactctatctgggtaagaatgactatagactgagctacatctctggaatcgttcctggtactacatatagcggcattgccttggttccaggtgataataatgatatcagcggtctcggagcacttagctgtagtagtctgacggttaatggagcttccgtatcaggcgctccatcatatgtagttggcattactccaggtcaggcagcgatcaacaaagcactggttcttggagcatcacgcgaaattgctactattagtagtttgacggcaacgtcgataacgggtacgcttcaaacagcagctcagcctaatattactagcttaggcacgctaccgtcgctggcagtaagtggaaacatatctggcacgctagcaacagctgctcagccaaatattacatccgtaggtacattgagcgatctcacagtgagtgggagtctgtacgctacgctacagacggctatccaactaagattacatctgaagacacactgattagccttgtagtgagcggacaaacatattgtacgctgaatacagctgctcagcctaatatcacatcacttggtacgcttactggattgactattgcagtcaatttagcatttacacgagcatcaagaacacttacgggtcttaactcactcactgcggcatcgatatcgggcacgctacagaccgcggcttagccgaacattaccagcgtaggaacgcttggttcgctgacatctagtggagcaataaccatttctgctggcattgcatcgtcaaacgcaacctcgggttctcttgtaataaccggaggtattggactcggaggtgatctgaatgcaagtggatcgatatcagcactcggtttcatcaatggattgattaataatccgactcaaagcaaaattacatcgctaggaactcttactggcttgacgatcgatggcaatctatcattctcaggagcaagcagagctattactggaatggactctctatcgatgagcggaaaatatgttatcactgtcccagcagcttcaacgctaagttcaacaacccccgcagcggaatatccaatgcaatttcggaatatatcgaatgtttctggaacagcatgcagaaggagcgctgagtaatttcacgccttcggcagctattattggatcaatcgaagcgactggagcaagtaatgttcatagcccaggcattttctctatccggacgcgtggaatgcaaatccagactgatggtgctatgtatgaacgcaggcctagacggaaccatcagatttggatcaactctatcagcgaaggattgcatctctatcttctggagtaattactcgactggtagcagtctcaactatctggctttcaacgtttacggtacctctaatgctctcgctatcaaagcaagcgatcgcatagggatacgaactgcgacgtcatctactgttttcgacgtcaataaccttcttacagagcttgccgccgcggatcttcgtctcattgcgcttcgcgtatctgttaaagatgatcgatggacctccggcgacgttagcccgtattttgtggtagatatctgcctcctccttgtcgattgaccagaccagcttgtcagcgttgaactcgagcagcttcttgcgtctgaaggctttcagaggcatatccttacgagcgacgttgcaagctatacagctgatgagaatgttgccatcctcatgaccgagcttgttgttgattcgatcggctgatgccgtctcagctgtatgctgacagtagcagagaccgcaaagatacttttgcttctcaagcagctcatctaggtgtttcatggtcatatcaaactcgcggtcagccttcttatcttgttcgatgtaccctaggtagcgctactcagggaagtcgagtgccttagctgggactctaggtcgcttatcaagattggtgaagcatgtctgatacataaccttctcgctcagccccggaagtgaaacaccatctgtaaagatgtcgagcttgaaacgcttgaatagctcacgctgggcttggatagcctgaacgaaggttttgacatcaagattgttgtaccagatcagcaggtccttgattgacttcatctcatagtgctcccacacgaacttgactcgctcatagtcgttgtcacttatgcttgttcctcggagactgctgtcgaacgctgactttgctgggatagtagtctcgttgagcacatcgaatgacttgatgtactcatatggagatagtcccttgccgagaccacagatgcaacgaatcttgtcatctcattcgcatccacctaggtaagtagtgagatacttttcatagcttgttccagctgggagatgaagggaaagcctcgataacctcgatcttcttgtggttccagagcttgtcataagtgtcaaagatagcatcgcatacgttgcatggatactttgaaagaacggtatcgatgttcttgatgtacatggcatgtcccttgtagtcgagaatgttgataatattttcgtacgccttctccgactcgcgtagcttgctgatctcaagagtgttctgatccatttcaaacacgttgattgctagctggaagcagtcttcgagctggtcgaactccttgatatcaattggctgcatctccttgaagtacttggctgagtacttgacactcttgaacgtacagtacgcttcgacacgatccttaaccgatgccatcattcgatcaggacgtgcgctctcctccaagtggtaagcaatgcagaagaatacacacgtgttgttagtcctagggaaatcgatgatgaacttgttcttcttgatgctctctgggatctcgatgttatcgccgagaatgtgatcacgcttgtagatcatgaccttagccatggtgatctccttgagctgatagcttgaagatgggtagctgatgcgctcagtgaaatccttagaaagcatctcacccatgatcttcttctcaatatcggccttggagttgattgggataggattgttgagcactgaagtgttcgtcgaaggctgatagttcctctcgagtcctgtgatgcgatcaattagcttgtagccaagctggacatcagctttgaaagccttgtcctgcttagagaggagcgaacgaatattggacatgatatccttgtgagagtagttctcgtacaggtgctcgtcgtacaccttcatcttgcgaaagttgtagctcgacggtggcttgtagttgggagtgaagtgtcgctggatacgggacttagggattttgcaagagatcgcggttcttacccttcttgaaggaagatatataaactatacgaccgttctgattcttgaccttgacacggaacgatgactcccatcgcttgaccgggatgttgaggcgcttgagagcatcgagttcgtagaacagcatagcggctatatgtgagaaaagataaaatattcaattctcttcttggtatattatttgggcttcgcttaaaatggattcatctttgtaagtcgtgaacaaaaaaaaatggagcttagtcgagcgcgatcttgcccgcacgcctagcatagtacagtctctgacgagcaagaatcttctcacgattcttctcatcgtattccttctgacgagtgagtatcttttcacgattcatgttgtagtaccgcttctttgcggctgcgatcgttgccttgttagcttggtatttttttaggagagtatgccattgttatccttattatataactttgtcttaagatcaattaggaaaagttatttaaaaaatattggattacttgcgaatctcgaaatatccacaactatggcatcgatactcgtgaacttttttatagcagcatgaattctctgaccgacaccacattcgatcacatggggtcaaatattcaagctgttcattgctcttgataagctcaccatcacacttgtaacgaccgaattcccctgtctgcgtaggatcggatactccttccgcttctgaaaccacggaagttgcatcaatcgaacgcaatatgcttgatccttgagcatctcctcgatcgaagagtacttcgacttgaacgatagctgaaccatggtgtcgaatatgctgtaattattcttagtatatccatgtgtcaggattgaaatcttttccttccaaatatttgctctttctcataagagctttctagaagatatgcgctgacgatatattgttcgaaattttaaactttgtcttaaaattcaaccctaactataatgggcctactttggcccactactttagcttacacgtgtgcgcgtgtatgtgaggaagcgtagctaagtttaaattagagttaattatactcgggcctccgagtatagattaatctaaataaacgatccaaataatgtttttgggttaaaatgagaactgctatttttgttttatgtttctgacttcctctaaatgtaatattctaagataggaatctgccaatggctggttggcagaattccaatgctatgcatgtcgctcattggctaagagatgctgctctcagccaataagaatcataagtctctatggaccacccgccgtggtggtcgtaaatgtatgtagcctttggtgtgtctacaccaaggtcgagaaagtatttcgaacctctaacagacgtcgtgtctgttagagttacaagtgactgtagccacttgtgtgtgtaaccctgttacaccatccccccctcaaggttagacgcgccgagtcacggcacgtcaatcaggaaattgaccattcgtcaattcttcacgttgggagaaagaaaactcgagctcatttcgcaatgagctcgcctcagaaaaagaccgacgctgcagcagaggggaagtcctccgccgggatagatactctctctatccccgagtaccgcgagcgtctcaaagcaaagcgtgacgctcttgctaccaaggctgcggcggggacaactcaaccagagattgtccttgaaggttcttctgtagtcaacgacgccgttgacttcgaggacgacgacgtggagatggaagagggcgatgcttcttctagcaagcgcaaggagtctatcgacagcgatagtctcgacccgcatgccgggtcgagacgccctcgtgaaggagacgactcggacgcttcgagctcgaagcgttcgcgcggcgagagcgacactccgctctctgctgctggggctttaagctccccgcgtgaggtggcgccttcaagctctccgcgcgctgcctgagcagcgcgcgatccgtggatgccgtctgcgtcagagatcgcagaccgtgtgggcaacacggtgccaccgaatgaaatcccgctgtacgtatgcagcgctatccacgacgatgctgttgcggaggagcagcactttgatccgttaacgaatcaaaggcgcgactattacatggggctcttccacgagctccggtacttctccagcaagaagacctcttctcgcagcaaagtgcctgagtggcaggcactttgtcagagttggaatgcttttgttgagaacttcaacaagaaaccagcagcttaccgcgagcgggttaagcatgcccgtgagcgcttcgagacattctcgacgcgcgggcggctggagcagctccacagatcctctgtggacgctggtattccatgcgctgtgcccgaaggccaacagtcttccgggtgcggcacgcttgagcgaccgcgacctaaacgggtacacgacgattcgtgtacctgcgagtctcaaggatctccgtgccaagttcttggcacgcgaggaacgcgacgatcgtgggacttcgggcgctgcgggtgactacagcgctcgcactaccttcgcgccggcagtgcgtggtgagcttcgtacgccctcaccatttccggaacgtcctgcagcaggacgtcccgcggctcccatgtatcttggtggggcggaaaccctctccaacgaatacgataacgaaccggctgccggttcgttttcgggatactatggttcacaatacgctcaacaatccagcgtgttgagccgcgggcatcgcggatcggaggcggtggtggtgggaacacgccccgggtatggtcaacctggggttgaccttggtccgacgctcgaggagcgggtcgctgctatggaacagcatcagagccgggagttcgccgctctgaagcaggaggtggcgattctgagggctcaagtcgctcaggactcgcagaccgcatcggacatctctgccgacgtgggaggtcgcgtcgcacgcttggcccagcgcgttcacgcgctggagcagaggttcgctcccgctggggcttccgcttcgggccagccgagctaggtggctcgtgctgccggtatggcttcagccgcccgacgtaaaaggtcggatggaggcgcatgctagatggaatatctagtgtgtaggcgttgccatgccgtgccaacaccgtgaacggcccgatgaagcgcggagcgagcttgctcgccccgaagtcggaaactgcatatttaggcaggttttgagctgctaacaaaaccaatgaacccttcttgaattcattagtgttgcccctaccaacattgtctgcgttcagcttctgtcggtcgacagaagctgcgatagcgtcttggacaaaccgaatgacggcttgtctgcgctgcacgaagttgattgcgtccgagctgaactcgttcagctcgtttctagcagtaggcccggcctctgcgttcgtcttcgcggtgtctgtgccctacacaggcccgttcttcttcttcttgctcttgtcggcgtctgtgccctgcacagacgcgtgcttcttcttcttgttgcgcgtagtcgcggctgacactgtgcaagtgtcagcggcattctgcggctgctgtgttgcagtcgtagatcctcccccacttaaggaaggagccaccatcccgagtagactcgggaggcgtgggtgcctgatggcattcacgtagaacggggtatgcccggtcgaggcatgcaccgagttgttgatggcgaactccgccatcggtaggcactcgctccagtgttggaacgagtgagcgtagctcttaagcacgtctacgagcacgcggttcacgcgctcggtctgcccgtccgtctgcggatggtccgcagtcgacatcgaaagttgactcccaagaagtgtaaacacttcttgccaaaggtgcagtgaagcgcgggtcccgatccgacacaatgtcgatcggcatgccatggtgtttgaacaccatgtcaacgaacagacgcgccgtctgcttcgcagtcacttcagcgggtactgcagcaagatgtaccatcttgctgaagctgtcaacaaagaccacaacgcccgtgttcccctggttgtccgggggaagaccgaacacgaagtccaaagacatggactgccaacactcccgtggagttggtagtgactgcaagggagcctgcgcgaaaggcgcaggcttcacatgttgacaaacctcgcaagcacggacgtacttgcgcacccatttatactggtgggcccagtagaagtctcgcgtgagaagaaggtatgtcttctcacggcccggatgtcccgcagtcggtgcatcgtgatactcgtacaggatcctgagtcgcaggtcatggtcattgggcacgacaacgcggtccgcgttgtcgtcgacggcactatagagaaataacccgtcgtgcacccgataacggtgtgcacgagcacgaagatgcttcggcaacttctgacgagctttgtcagaaggcgctgagccgtaggccagcaagagcttcgcgtccgcgtcgtgcgcgtacgcgaccttcacgtcgtccaacagtgacgacgttggggtgctcgatcgcatggcgtcaatggcattgacgtcggcatcagtcgtggcgtagtcaggtcgacgcgagagcgcgtcggccaccacattgagtcttccgggtttgtactcaacccggaagttatactctgcgaagaatgagagccatctcgccatccgttgcgagatgtgcggcgacttcacagccgtccgcaacgacgcgtggtccgtatagaccacgaacggtttgcttccgagtagatactcggaacttcgcgagtgcgtacttcatggcaaggagctccttgtcatgtaccgggtagttgggctcagctggcttcagctgacgcgattggtactagacgacacgatcacgaccctcgtgatcgtgctgcatcaacgcacatccgattgcgaagtcggatgcgtcgcacacaacgtggaatgggcgatcttggtcggccaccgccaagatcggcgcctctgtggtggagtccctcagataaaaactaataaactcccacacgtgtcctgccacgcaactacggggggggttacccctgcaagccaaatacccaaagacagcgagaactagtcccgagatctctaggcctcaccttgtgtacccttgtagcaagactcggatctttatctagcgtaattcctagaagacgtgtaatatgaaggggtggatatggggttccttacactcgcaggcagagacttaggttaactctgtcgcggatgcacttgtacagcgaggtaactcttcccactgtacgacaacttgttgtacaatatgtacgagatctactggagatctcctgccgcagctgagatctcctgccgcagctagtctgcgggtccaaaccaaagtgcgagacgcacaccaataccttactaaaccgtttagagtgtcctactgtcgaacactgagagctgatctcctgagtccagacaatgcaacacactacgctactagaaggttaccggggaggccaaatcaatccagaaccccgagtacattttgcaagtaggtaggaaacagtcacagtacacacgtaggcgctaaccgcacaacacaaagactaatatgaagaagtaccttgtctcgtcgttggaaattctgaactgaactgcctatctaccggcggctcatctgccggccaaccaaccaaccggtatgctgcacgcctttacctcatgacgtcatctgctgtctccgtgcggtgtcatcgtccttgttacgggcctccccgttctggatctccgtaaatacgccatcgggtttcgtaatcagtcgccggccttctatacgggacgccgagctagggtgtcccataattcaagtggctcactctcgggtcaccttcgggtaacctccgggtccatcgcctcacaatccttcaacccgcattacgacatccgccctctcttcgcgtgaggccatcgagcaggtggctgccacgcgtagagctcctgcaccatgtctgcttctccacccgcgtcgtcgccttcgtcgtcggccgccggcgtccctctgctgagtgctgccccgtcgtcgacctacagccacggagattgcaccgcctgtcactcccttggtcgatctatactccatactccggttcgcagccatctctatcggaacgcgcgcgcattatctaggctgctcaagtcaccgcggccctcgatcacgaggtgctggatctccggggccgtcttgacgtcgcccaggatctttttgaagcatctggttgccacactgcaagtcttcatcgaaccatccatgatcgcgatctggaggttcaacgcgtgcgcaacgaagtcgatggtcgtctccgggatctccagcaggccctgaacaccgaagtagaacaccgtcagcaagccgaagctgctgaacaacaagcacgcgcagatctcgcacgggtcgccgctcgctcagctgatgccgatgaagtcactccgtccgctgcagcatcgccctctaacgtcgtccccagtcagttggagatcgccctcggagatccggatgatctacgagccgagctggcagatatcaaggctacctggacccctcctcccactgcatcggtgaccccaggtggccgactgttggctgccagcgaagctgccaccgatgatgatcggactagtgacggacgcgcgggacgtgccttgcaacgatccaatgccgaacgagacagatctcgcaatcaattgcgccaagcggaggcgacaatcgacaggttgcagaccgagttggcgcaatcgcgcacgctggtcaacaaagcagcgccacggatggacacccttcgcttggatgcgtccaaagctcgtgaggacgcagaagaagcacgacgagaagcggtggcggcgtcaaaaaggcgcaagacggtggtaagtcgtcccaagtgctgaggttgttgatgttgcatcactaacgccatgatctccacagcgacagcgttatcggatctcgcacagcggcatacggtggctgggaagcgactggaggagttggagaggaagatcactcggctgactcagcataacaccgttctacggcgtgagaacgtcgacttcaagaacagtttggtgcatcgtcaggctgatctcgcaacagctcaggatcgcgcagtggctgcaggtcatgatcgcgcgtgctaatgtggcgggttgactcttgtgctgacctgtgcgtttattgctttgtagaacgagagcgagcggaggcctccctcgctcgcgacgacttgcaggcggagctggatgcgagtcgacagtcgctgctgaaggagcaggcttcttctgctgatctccgcagcaaactagcggagcgtgaggaacaccttggagcgttgcgcaacttgatcaatctagtacctgcgccgactccgcaacctgaggtggaacgatgcgtggcgtcggcttcttccagttcgtctcttgccacactggcgtcaacggccacgagccttgtctcctctgatcctccagcgcgaacatcttcgcagcagctcccgtctggctcggcaaagcgaagtggagatctctcttctgatccaacgtcacagtcgaagcgtgcaaagcgcgccgttgcgactaccgagggagcgccagctgagttgtcttcctctacggcgatgggtacgtagctcttcctcattgtcagacaagcgactttcatagatctccgtctgacagcccgtggatctctgtatcagcccgaagcccattcacgcacgcaattccacctgagtccagcgaagctgcgcgccctgccgatgtcacgccgtggctgtgggaggttgttgcaggtcaccgccttgaccagcttacagccaaagacctcgcttcgaagttcttaccacgcgactggctgctacccgccggggtgtgcaactttaagaagggggagctggccgttcctgctgactatcggccctggccacaagcctcggtcgaagctttatacaaagcgagtccctggaagatcttcctggataacatgcccgacccagtctcgttcgacattggtgatccccgcttccaacctcttccggccatcatccgcgatgtgctgactcggaacgataatcgtggcgcgcttgtgttctgggagatcacccactccatcgagatttccatttccaaggccagcgctgagtcttgggaggtgaagttcacttcggatcgtaagaatcggagatcccactttgtgaagatgctgctgcctgtgttcgaagaggtggcccacctgtgcaaggtttatgtgtgcgacttggacattcttctggagccattcttcctgccgctgatcgcaacgtgcccgtggttccctaagggagcttctggtgcctctggagatctgttacacgtcttacgaacgactgacgaggcggagccgtggcgcctgttctactggaacgctcgtgccaaacacccatcgatgaacgaacccatccacacgcgccttcgaggcaagttcaaggcgacctcgtcaaccgcctagcctgagtcagctgaacagacctaggaggacccccggaaatctccagcgtccgacatttcttccttcaccaatttacgcagctagtgggtagtctcctcgagcatgcatcttctttatcgacatcgtaatacaccggcttcgactccatttcatatcactcccgccccacagcttaattgtacacagtcaatgtcataactgagagatctccccaactggagatgtgaaggcatgtcgtaggtcgccgtacattctgggaagtgatttgtggtgatcaaggccatagcacaaactccaggcgtaggactgcacttagtccgacggccaccgaccacgccttcgcgccctcggtgtctcctgcactgcggctccgggctggatctccaagtcggcgatgacagcgatccggccaaaatcgacaaaacgcgcaggtagtctctgacacgaacggtgccggttttcaccatcgcacaggcccagagcgtcgtggcaagcgcgtttcagtagtcgtcggacgcgcgttcgcaccccaggtgcctccagcactgcgacaccgggctggatctccaagtcgcccccgagtactcgttcgtcgtaattctaatgtccgaccagatcatcacaactaacctcgtttctccattccatcgcgtgatcttctctccatttcttcttccactcaatcaaatgtaaatgtgcaacaaataccatccgccattacggatagcttccaccacgctaccccccaacaccgcctcactcttcggcgatgtcggcctctccacgcgattgcatcatatggaacctctgccggctccgtcgcttctgctggaagtcgaacagcagaccaccacagttcaggtgttcttccttgacccaattcgtctctgcgtggcccttccaacgcaccaaatattccttgagtctctccgtcttgacatccaagatctcttcaacttcatactcgttgtcaccgcgagtttgtgcctcccagctatcctcggggagaagttcttcgtcaaagtcaaatcgttcgctttcatcaacagtgagatcttcggcgggtcacgcggggaactgtcggaccagcttcagcttcgagatgtgtacgatagggaacagtcggtagtcagtcccgctgatttccagcttggcagcgtagtcgctcaccatggtggcgactctgaaaggcccatgccacatgtgagcgagcttccgagcgtatccgaccttgactcggtcgaggtacagccacacctgcgatccctccttaatgggtgactccggtacgttctcattgtgggcttccgcgcgactctcacgagcttcggcgaggagacgacgagtctctgtctgagcacgttggtattggcgttggatcttgaacctccatttctgtgggtcgagatctcggcttccggtccctccaatagccaacgatgcctcaatagtcgttttagggtcccacccgtgcagaaaaaagaatggcgtgtccttgcgtactcggtcgtgcgatgtgttcaacgcaaacaccaaccgctccgcatattcatcccagtcctgttggttctcgtcttcgacgtacatccgcagagatctggaaatagtctggaccatccgctccgctgtatcgtttgcttgaggtctatacgcgagcgtagatcgctgacgctggcccagcagcgcattaaacgactggaaaaagtcggacatgaagctcggatcctggtcgtgcctgattacttcgctggctccgtaccgccgaaacacgcattcctcgtatgcctcagccactgttggtgcggtcctgtccgcgtttgcctttgccacaacgaagccggtgaagagatccacgaagactaggagctctgtgttgcccttgaacgacttcgggagggtggggatatgatccatagccacgacctggatagggtaattagcggcgatattgcccggcgatcgcccccacaaggtgggttttccttttcccgtctcgcagtcgacgcactccccgacatacttctgcagacttcggaacatacctcgccagtagaaatgcctccgaagcttttggaatgttcggctggctccctgatgacctccctccacacttgtctggaaatgatgccggagatcttcgtggagtgtactcgacattaccagtttcaccatagatccacggccctcgacatcaccaccgcgcccctcgactggacagtacatcaagaggccatgctcgtcgacctcataactgccagccagtttactgcacgtcttggcttgacggctcgagatctgagagagatcaccgtgcagaaaacacttcagtgacctcatcgtcttgagcacggcaaatacgttccaagcgcagctgcttgacgacgtcttcctgcaacacggctggtgcgacagtacgagatcggcttcgcgtgacagcgcctaccttcggatgggcgtcacgttcttcgcgcgtcttgaggagctcgtccagtcgattcaaggtctcgaggtccgtgtaatcggtgtgactctcgacaactaccccggaccacgctgcagcgcctgtcccgccagcatatccgcgggttggttccaatcgcgttttacgtggatgagttcgcaatgcggccaagaccgcaaaatcactctggccttctcacgcaagagctgaagtcccgatgacttgcactccatctctccaggcagttggtagatgactaaattggagtcgccacacacaatgagacggtcgatctggagatcggcaatcaaacgaagttcgagaaggaggccatggtactcggcctcgttcacagtgaggtccggtaaatagccagattcagccttgacaaccttccatccaggagcatcccataccacagcgctgaaagctccaccaactcgtttcggcttggccgatccgtcaaagctgacgacgcaaacgttttctccgggcgtaaaagtcggcatcgggatagccaatgctctcgtcgacttcttctgcggagagatttcctccaacgctgcatccatctctgcgcgcggagtgatactagcggcaaccaaacctagtagctcatcttcgcctttcgttaaacgttcgatctctagcaaatggggggagagcagcgccgcccactgagctagccgtccattcaagcctttcgcgcggaagagccatgcgagactcgtgtgtctggtgagcactcggatgtgtcgaccactcagcatggtgaagcagctatcgaggattcttagcagagccagtacttccttctccacaatgtcgtacccgatctcgtgagaccgcatgtcctactcgtaaatttgacgggtacgtacactccatcacgacgctgaacgagagaggcagagatcgcccacttgcttgcgtacacaatcacaacaggatccaactctggggcaaaatggtagagcatgggtgcgttgatcatcttgaacttcagggtgttgaaggctcgtagcgcgtggccccatctcacagtcgcctcgtgatttccgctgacgtttgtggctcgacccttgatgaaatcggaatctccgaactcatacaacactgtggcatatacagcgaaatcttcgatgaagcgattgtagtagttgagactgccgaggaatgactggagagccttaagcgttttgggaaacttcaacgcctccagacttgccaaatctttcggcttggtgaacaggccttcaccagagatctgatgccctagatagtcgactttgctcataccccaactgctcttctccgcgctaatagacagattccagcggtcacaaacctctaggagcttcttgaccgtctcacacagttcgtcccacgagcttgctccaactaagatgtcgtcgatgtaagagcgacgccccagcaccgacggcagcgatcgatcttcaggaacaccttcctcgaaaatgttgacgagatccgcgcgatcttgacccggcgagatccgcagcacgccacataacgcattgtcgatcagccgctgatagatttggggggcattcttcagaccaaacggcattcgcagccactcgaacaggccgaacggcgtaatgaacgcggagatctctcgggctcgatcggtcatactcaccacccagaacccactcgccatgtcgagagaacagaaccacagcaaactgtcgagatcttcgaggaggtcgtcaatcaacggcatggggtagatcatcagtcgtgtcagagcattgaccagacggtagtcgatacagagtcggacgtccacgccgttcttcttgacgacgataacgatcggagacgcccaaggagaagtggagatccgaataatcttcgcccccagtagccccttgacgagttggaacaccttttcacggaactgaggcggggtccggcgacaacgctgagccaccggtcgtgcaccaccaacgtcgatgtcacagatcgcccccgtcgccgcagggggtaaagcattccctttgccgatgagaaggtgacgccgctcccaaatgatatcacgcagacgatcaatctcctctgctgtgttctcagttggatccccgaccttgatatcttcccttttaacttctgccgtcagggagatctctggtaacaccgccatctccttttcgatgtcttccgcagtgagatcggccccttcatggacatacttcgcttcgtccatgtcggttgcatctccgccttggcttggttcgacctgggtcactgggagcattccgctcaccggctcctcttctttctcgtcgtcggtctgccagtcaaagctaccccagctaccagtagactcagcgctttcggacgcacagctacagctgtcgctccagtcgctttcaacgatgaccgacaacgtgcgatgaaccatttcctcggtggccgcggcgtgtattttcgattgtggcatgaggtcaggggtatattctgggaactccttgcggagctcggcctcagccacatttgccggagtcgacgccaagcctaccggtgtttcgccactgttcgtaaaggataggccgctctcctcgcctgcgtgagtttccgtacgcggtagactggagtcatcgctgtccataccagagatcacctgaccgggatcggtagagatcacgtcctcctcggtttcggtcaccctagtcggatcagtcgaacttttcatcagctgcatttgaggatgtatgtcgtccagtgtgagtcgcgtgcattcttctgacgttgctgctgcttcaacggtcttcacttgtggaggccgtgctaaaatcgcagtcggagtccggtagctaggacgctcgaccagcggtccagactcttcaacttccgcttcgtttgcatctccagtgtccacagctgcttcgaacgcaagtgtttgccactcccgatagcggtttgaatccttcctagcgaatccaggtcgacgcgggatctgcccaacgggtaaccagattgccaaacacaccaaacgatccagtaccaggcggctcgtgctgatgttggtgatccggaggtatgacttgttactgaatccaccattcaccaccgtgatcacccatttttcccctctcgttacccacagttcaaaccgcttgttgtgggacttgagtgagatctctgtccattggccaggaccgactccatggaatcccgttgcgtagaccgcgtcagccttgctgctatacagtggcttacggtcggtcatctggatgcgaacttcgtccggcagacagagcgttccgtcagccaggtccaacctcacccccgcaggaaccataaaatccatgccgagaatgacgtcttgtcctgagagatctccaacccacacacggaacttgtacaccaactctccagccagagtgagcttgacttctgctcggccttctgtgcggtacacagcatcccccacaccaacacaatccattgtctgtgttgtatcaatttcacaacccaccttacgtgcaaaggtagagtcgattatcgacacttcggctccagtatcaaagagtaggacggcacgggcattgttgaccgcaccggtcgccttcgactgcttgaaccacttggagggagtgtaatacttccagtaacctcggcgttcacccggcgacagtcgaagggccatcacacaagggcgacgcgaatagtcatcttcatccgaggtaagagatctggctgtattcaccgcattaaaggaagttgggtcttctaacgctcgcgccttcctctgaacatatgcataaatgcagaacttcgatcgctcgtcacgtaccaggctgttcaggcctggcgagcggtctagtttaacgccttctcgacgctctcgggcagcagtccggcatggcgagtcgggttgtaccattggcgagcagcatcgaagaagtcgccgattttacactgacctgcttcgtgaacgtctccacagcacttgcagacgtagaagcacttgtcggtaggatggcccatgcgtccacacttctggcacgtgagcctcttccagcacccgatatccgtatgcttgcgagatccgcagtgtgagcatcgagtgccgtacttcgggcgccccagttggtcttcgcggtcttggcgcgcccctggctgttcaccatctcctggtgtaggcgtcctagctgccgaaaacacgtgcgctctttcgtcttcagattcgctatcagaactgcttgattcgccctcgaactcgttgagatctccgtgatctccgcggcgtccgcgaccggtagtcacaacccgcaccgccctcgaggaggctgcaggggcgggagccttttgcctgtatttcgaaccttgggtctcaatcttgcgacgttggtggcggcgtcgcatggccaacaggacgccttcgagagcttctgagtcaggcagcctcaacactaccagagatccggcgagatcgtcatcttggactgtatcgatgtagtggtcgacgtgttcacgtcgttgttccttggtgccatcatggatcttcaagtttgcacgtatcccggccagattcagccggtataagtaatccagtgggccttcctgactcccgcgccgcatgtggtagtacttgcgcgcgagggagatccctttaccgcaaaagtggatctggaactgttcacccaggtcagtccacgacgcgcgagccgcagctggtaataccaattgcgcgcagggcctatcatcaaatcggcaaatgtcaagcacatctcgtctggctgcatctgatcccgtcggaaggccgttctaacgttgttgaaccaggctcgggtggcttcttcgccatgttccttgccgctgaagtccttcagttcggacacagccgatgctcgcaacctagtcgccgtggacacagctgcgacacgacctccggttccgccacctccatcatagccgagatcatcggataggtcatggagatctccttggtattccgattgtgtctgggatcggtacccgatacgtggccgagcgggagacgcagtgactggttgcatctcaacgtcttcaggctcgtctcgctcgttcgcaaactggtaaagaaggtcttcagccacaccgccggggcgatcgggctctgttgcaacctcttgagcctcctggatcctcccctgtggtcctctcgctgggcgagtctgcgcaatatttgacacttgcgcagacttcccgcgtcctacatcgtttgcagtgatcgctgggatcccttgcgcacgtcgttctcggcgggacacacgtggggccggtggaggcttcttggttgaggtagtgctcctcatgagagcgtcaccgtcatctttaaacttgaaggagatccgcgaatcgtccaaccgaggaggtgtgaggtctccggtcggcaacggcgcggatgagtcatctgcactcgggacgagcttctgcaacactgcgtacacccgcgcgagcgtaaggacggtggtttccagatcgtactcgcgtacatcggtggagatccgctgttcatgtaccttgaaaccagcatcttcgagcacgcagaacagcatcgtggcggcgtgaagcggatctcggattgttagcgtgcgcgggttgcgaactggacccgtgagaggccatggtatcctcagccccaacttacgcaggagtggatctctctggagcaggaacgcaagctcttgacggaagtagttgacttcggcttcacgaaatcgtttgtcttcatcgtgagtgtcgttgctggggccatggacctctagcgccgagatctccaatttctccgttttcttctcggctttcttcttcgcatcttcgacttccatgtagtccatcgcagcgtctagagcatcgcttcgggcagcgatgtcggggatgacccccttcagatgctcgcgctccaggtttcgacctcgcttttcagcgacgccggggtcccgcttagcagcaggcccaatggaactcggtttttggaccgagtcccggacggttcctttcggagccttaacggggaacatctcttcgtaaacgaaatccttcggctcaggcgtccccattgcctgtccgtcggtggacctagtgttttcacgtttaacttccgccggtctcagcggagttccgtcttccctcacctcagccttcaccttcacgccccctttcggactagtagatccgggcacgcgcaccattgtggtggagtccctcagataaaaactaataaactcccacacgtgtcctgccacgcaaccacggggggggggggttacccctgcaagccaaatacccaaagacaacgagaactagtcccgagatctctaggcctcaccttgtgtacccttgtagcaagactcggatctttatctagcgtaattcctagaagacgtgtaatatgaaggggtggatatggggttccttacactcgcaggcagagacttaggttaactctgtcgcggatgcacttgtacagcgaggtaactcttcccactgtacgacaacttgttgtacaatatgtacgagatctactggagatctcctgccgcagctgagatctcctgccgcagctagtctgcgggtccaaaccaaagtgcgagacgcacaccaataccttactaaaccgtttagagtgtcctactgtcgaacactgagagctgatctcctgagtccagacaatgcaacacactacgctactagaaggttaccggggaggccaaatcaatccagaaccccgagtacactttgcaagtaggtaggaaacagtcacagtacacacgtaggcgctaaccgcacaacacaaagactaatatgaagaagtaccttgtctcgttgttggaaattctgaactgaactgcctatctaccggcggctcgtctgccggccaatcaaccaaccagtatgctgcacgcctttacctcatgacgtcatctgctgtctccgtgcggtgtcatcggccttgttacgggcctccccgttctggatctccgtaaatacgccatcgggtttcgtaatcagtcgccggccttctatacgggacgccgagctagggtgtcccataattcaagtggctcactctcgggtcaccttcgggtaacctccgggtccatcgcctcacaatccttcaacccgcattacgacacctcagtcaagccccgcttgactgcatcgaaggcctgctgacactcagcagcccaaacccactcggcgtccttcttcaggagctgtgacagcgggcgtatcatgcccgcgtagcccttcacgtacttgcacaagtacgtggccaaaccaaggaactgccgcagttccttgacgttcgacggcgtcggccactcattgatcactctgaccttctcaggatcagggcggacatcgttcttcccgacgagacacccgagtacgggtatctcgctcgccccgaagatgcacttcttcaggttcgcatagagcttgtgcttgcgcatgagcgcaagcagcttccggagatgcaccttgtgtatctcaacatcgctcatcccgtccgcagcccggctgtggacgaacacatcgtcgaagtagctcggtgcgaagtcgcgcaccgagcgcaacaagtgcgtcacacacctgttgaaggtcgcaggggcgttcttcagaccctgcggcatcactagtcactcccagagcatgccgctcggcgtgctcacagccgtgagagggatatcgctctcacgcatgaggatctgatagaacccatcgcgcagatcaagagcactgtagatagtgctcctggccatcgaatcgatgatgacatcttttcgcggtatcggtgtctgcgccggtatcgccgcatcgttcagcttgttgtacgcatgaacgatgcgccaaccgccctgtggcttcttgacacagaacgtcggagcactgtgcggggatttcgattcccgcgcttgtccagctttgcgacgactctcaaagaagtcgtcgatcgccttgacctgctctcgcggcagtggccactgccgcgtgacacaatacttcgtccccggcacgagatcaatctcgtgctggatgcccttgtcctgcagaagctccgcaggaatctcttccaggagtacgtccgcgtactcccgtaagatctcgtagtagggactcgtcttcaacgaatcccagctctgctcttcaaagcgctccttcttcgtcttcgcactgagagtgtcctcgctctcagtggtggtctccatgaagaactgcctcagttcttcattctcgctcttcgttctctcggcgtccgagagaatgcatatttgctcgatgcgtccatcatgcaagtcacgcgcgaagcgcttccagctcatgactggaagcgaagtcaactccgacgcttgcgtcggagggttagcgagagtcatctccctgtaccggaacccggcgcaggtacgcgtcaagacgttcaacgtctcgacgtccggcttctcagcctccgtctgcccggtagacattccttgtagcgtctcggccccaggccgagacttgcgcagcgatcttcgcatgcgccgtcttcttgttttgcggagcccggatccgcttggttcttgacctcgtccaggcccagccgtggacgggtgttcttctttagtaccgccggcgggttcatcccgcgggcgagcaacttcaagcccggcttggtcgcccggcgcttggtcgtgcagcccggctgcacgacagcatgcaagattttccggtgcgggacgtttgcaaccgtccgcaccacctgcagcgtcggctcccggagccgacacgccatcttcacctcgacgcctgttattggcggagccctccattacggagggtgcgtcggctccccgagccgacgaatcaaattcacccaagccatcgactcccggagtcgacggcgttacgtcaccttggctcttattattggccagacctgatccactcagattcgcgtcagcctccactgctgaggcgtgtgactcgccagcgtcatccgtgccccttgaggccggagactcttcctgattcgctgaaagcgggtgtcgacctccgaggtcaacacatttccttcattagctgtcggcggcaacgccgacgctagctgctcttgcgcgcgtactcgcgcgcgcccagggcgctccgggacagcggtattaggcgctgtctcgagtggggagtcgcgcgcacctgtcggtgcgtgcgtagcggcaacagggccatcgctcactgttccgctgtcgcgaccgaagcgcacgagagtgcgcttctcccaatcgatgaccggatcatgccgtgcaagccacggcatgcctaatacgatgttaaacttatcgtccagatccaggccgataaaggtctcgacaaactcttgatcttcatacgtgaagcgcacgcgtaccatgcgcttctcggtcttcacgacggcacccgttgccagtcgtacttccaacatacttcgaggtatctttaaatcctcgaagtcaagccttgatagacttcgcagtcgaacaaagttcttcgacgcgccagaatctaccaaagcacggagagagccgcttgctctcatcgagttcacatccaggatgacaaggtcaggcttgtcatcttggttcttgcagtgagaatgaacctcactggggactgcagtcctcagtgtcgcgtgtccaaggtcgacacgcggaactgcattaccagtagggcgccccgcgcctactggcgtccagcgttttttgtttggttgcgacggtgcccggtaccgccgcgatagccaccctgctggtgcacgggggccgtgcacccccgagcaaagtgaccgactctaccgcaacggtagcatcgcacattgtttccctgcgactgctggggtccagcagttgcagcactcgagaggtccatggtttctgggcctcccgtcctcactaccgggcgtggctggggcctcggcacatgtgcatgcagcttagcctgccgcaggctaaactcctcctgcattgcaagagtaattgcagcttcgagagtactcgggtactcacggaagagataggtcttcacaggcccatctttcagccccttcatgaacgtgacgaccttggtcgcctcgtcgatcggattggtcacgatgttcgagaccaagtaccgtgctatctgagcgtaagcatggacatcatgcttgccctgctgcaggtcgaggaactccgccctcgaccggaactcgttttgcgggggctcaaacgcttgtctgagctctttcttgaaaccctcgtacgtgctaaagcacgtaagatccgagagtcggcgtccatacgcccaacttcttgcacgtccgccaagacatgacatggcgaacgcgaccttcgacaacgggtcgacgatgcatcgagccgcaatggcagtgtcaagttcgacaagccaacggaggagaggctcgccctctcttccaacgtaattgctcacgctgagcttcagcgattgcgcgcgcggtgtcgtccccgacgacaccgtggtagacgaagcagcatctcgctgctccctcatgatgaatcccagagcaacaccatgttgctctgtcggcgttagcgtacgcagcatcgtagctacagccgcctcaccaattactgttgacagtcgttggagagcttcccactctgggtccgacaggtggggacagtcagcgcgtgcaacgtgagttgcaggcgtagtggagttttccatgggcacctctgtatccatgggaaggttctcagttccgcgttcgtgcgatgacgtacgaactcaggtagtcggtcgttggacggactacgaagtgctaccaggtgtagtgggcctactttggctcactactttagcttacacctgtgcgcgtgtatgtgaggaagcgtcgcttagtttaactagagttaattatactcgggcctccgagtatagattaatctaaataaacgatccaaataatgtttttgggttaaaatgagaactgctatttttgttttatgtttctgacttcctctaaatgtaatattctaagataggaatctgccaacggctggttggcagaattccaatgctatgcatgtcgctcattggctaagagatgctgctctcagccaataagaatcataagtctctatggaccacccgccgtggtggtcgtaaatgtatgtagcctttggtgtgtctacaccaaggtcgagaaagtatttcgaacctctaacagacgtcgtgtctgttagagttacaagtgactgtagccacttgtgtgtgtaaccctgttacactaacaatatcacgctactgacaggtgttctgtctcttccacagcgattaggtggtttgaagtgcgatgctcatatcaagaatgggtggtccggctgaattatctgcgcgggcaacaatggtaacagggctgcacgctcttgtctcttactttgacggatattcggcaaggtggtttggttatcgcctcgaagtcgatgccgtgggtcttcgagggccctttgtcagcagtttctcgcttttgaaacggcgcatttgggaactcaatgcttggagtggctgccgtatgtctctttcagagatttgtacatttacactgaagatgatgtgcttttgagtcctaatttggagttaaggtccatttgtgccaaaggggtgcgtcttcgggatgtcatgcattggaagattcacgggggtggccagctgacgttctcagctttatgtcctcgcaaagctcgcacccagacttttcaagcacacttcgaacgcttggtgtatctacttatcttgaattatccgagactgttgtacaaacgcatcacgaacaacgaggtgcgttacctcacgtcaccaccagatcatccatgtgtgacggagcttcgcgcaggtaccccacctgcgattacagttctgaatggaacggacattgtgctagggcggactgtggcgagccagccggacttggagacactccttcagcggactctgaaggactatgctgtggtgcactatgtacatcctcatccagacctgtgccgaatggtctgcctctgggttggccgacgtcgatgggcccaacctcggcggcattacaagcttggtatgccgtggcaatcacgtcgtagaggcactgatgaagttaaccgacgggctgtacaatggagcgtgcttagtgtaaaagctggtcgtgggattgaaaaactcgaatggaaacagatccgacggattgttggcctcggtccatggggggagcaactcctcatgcgccttaaaaaccacgctctttccctatatgatgtgaccaaacaatgcatggggtgcccccatgtttcatgtgccaaggagggtgtcataacattgcaccacgtcttctggtcgtgcccctgctgtcattctccggaggacattcctgcaacgctggaggacactcggattgccccttacagctgttgaagaagatatgttctcgctgcggctactgaaggataactttcgctttaccaagaccacagtttcagctgatgacgttgccgtcatgggactacgtattatgtggatgatgctatgcaacctgaagtgagtaccatagcaaaccgagtagccaaaggcgtagagcaacgaggtctgttatttattatcggcttgatgttttcttcgtgtccacaacacgcgcgaagtatttgtctagtcttgctcgaatagagcctcgtaacactgttgtagcattacaccgtgcgacaccacgtagccggtttcgcgcacagacaccccaagcaccgttgccagacggacagcttcctccttctcgttggcgagcagcatcgtagccagctcgtcgcgctcgttcaaaagttgaacgagtactgggcgatcttgtccagtctgtcttccatagcctcaattgccttgagcctagatatcaacagaccctggcaaacgttcgccctctgagctcgcgatagacgcgtgcctgcgttggtcgtgggcggtagcggtgaggccgaaagagcgtcgctgctaaggtcgctaggttccatcttctttcacgcttagtgtgcaccaacagccgctttgagtcgaggtgtctactgtgatattctggagtacgctcggaaacttttgcggtttccgtaattaatcgcagatagattaccgcaaatccagttacacatagcaagcaccatcccttacaggctctacgttgcttgatgtggtgtttgctatgtggaaaaacccttgctatggtgccataagagctgtcattttggtgtaatcacgttgccgtaacgtcgttcgaccccggacgtactaactcgaaatcgagtgtcgagaacacgccaactacttaacttctttaatttttaaatcgccgaataagacgcaaatgcactgtaccgcagtcccgagttggcctcacccaacgttccttacctatcccagcctactcaaagctctcgtattgtgcccaaatacaatgttgatactgcgctaccagcccaacctttctagttttgtagcccgggtctgtattaaattatactgggagtgggaggacagctttagctggctgaacagcctaaccaattttattacagcggccgggagaccccccaactttaattggcaaatgtcgcctgagtccatagtccacagattatggctaccgtaacaccatgaagtttgtaaatttcgtggctagttgtttccagaatgtcgaccgtatccttggtgtgcaccacacactgtcttgtacaatacaataaaatcattgcagccaattttctaattgtaattgttgaccccaattttattaatagttttattgccatttttatttacgcaacatcaaccttaaaactaccggttcatcaccagtttgtttgggggacagcggggctatcagcactacgtcgcttcctatcccagtataacaactaacggattgaagtcaaagccaattggcgaaacagacgcacgatgtcttggccccgctctaaataacatgaatccttcttatgtaaatttatatttttctgttcgctggaatgcatgaccacaacgcgctcggcagggggcgaagccccctgccgagcgcaccgttaagttcttccatgtcttttgcacggcaacttcgccattattttttcaggaaggcgctactatcagggtttgaaaaattgccaccacttttcatgttacattattctcgcctaccccacgcttagatagttaccaataggcacacaaaggaagtctacactgtcctcccagaccaaagcttcgcctctagtttaataatccgggcttctatttgatacagggcttctatttcaatacaggggtaaaatccgccggtaacgccctacatgtatgtgaaccacatcatgctgaatcgtacctagctgagtctgctccaacgcgccccccacaacacgaagcgcaagcgagcgagggagcgactgatggctgacgtcgagatggaggacaagacggcgctggacgacgccacggagcgcaagaaggctctgttggtgtacaagaccaacctccagtcggcctcggacgacgacgacgacgcctcagacgacgacgaggaggaggacgaggcctcggcaggcaacgcgggggttgctccgccgcccgcgggggccgaagatcacgacatggagctgcctcgagtcccagtaaagcaaaacggagcgggcggagaggaggaagacgaggtggacgtggacgaggacgaggagggcagcgtgcaggtggagaaggacgacgacgagtcgatcaacgcgccgtcagacgacgatctggacagcacggccaccccgaggcgctcagagaccgacgaagacgacgatgaacatttcaagagtgcggcctcatccaaggcgccgtcccccgaggtggacgagaagaacagccagcagctgcagaagaagatgccggcacacagcgagacggattcggcctcggagatgaccgtgaatcgcgctccatcgcccagccccagtaatgccagcattcagcacgtggacgattccacgacgctgacgctcaagtcgggcacgtccaatgtaggcgcgatcattgctgcgcgacgtcggactgtcgcgcgaaaagagtgcgaggtttgtcacgagcctcgcaatggaagacgcgcacttttgtgtgtgcagtgcaagtgtatgtatcacacgagctgcttccgccaacagttctccaaaatggtggtccagggatccaatcgtcagtggtattgcccggattgcgagccggctgccaagaacgcatcggctgagaaacaacccgccagcacaccacgcaagcaacagcgtagcgatgctgctgccaagggtcgcggcagtcgcggctccaagccctcctctgcaagccgaggcaatgatgacaaagctggagtagcgggtgggttaacaggtggtgcagcggagtccgaggtgcagcggttgacagacctcgcattgcgaggcggcaagaacatcaacgctacaattctagagcaaactggggaaatgctacacatcacgcagtctctaactaaggagatcaacagcgtaatgggccccacgtggcttggcaactctgacagcaatgctgacaacaacggcaacgtcaagcaggagacgcaggtatcttccccaccgccgcccccgttcgtgctggtccctacttcgtcttcagcccactcgtctgctgtcacatcttctcaggttgttgttacaaacgatactgctgcacgtgcggacggcagcaatggcagtactgcttcatggaacggctcagccgcatcaaccgtctcggagaaagatgtcatgttgcgccgtgtacacaacggtttggactccttaaaacagctcctagagcaactacaggttgcaggaatccagtttgaggtggattttattaaggagattaaggctactccgaaccaagaccgcaagcctgcgtccagcggtggggctcgaaaggcccagggtgcaacaggaacggcaggccgatcggcatcgggctcaaagggaaagagtggtgcgagccgattgtattcttcaaaacagatccagaagctggaggagtggtaccagcggtcgtctcggccggagtccagcgagattcactcgatgtaccgcatcattaactgccctgactatgcggatccagagctgcagcctgaaggtatctcggtgaaacaaatccgcatctggttcgacaaccgacgcgccaaagaacgcctcgactacatgcgcttgaagatgaaggacatttcaacaaccgacatggatgccgacagtgtgaaaaagatgaaggcagcgtatatcgacgaggccaaggaagtgctcgaggcgcgtgtgtcgcgcatgcgtgaaaatggacaaggatcgggtcatgtggtcgacgaagcggatatggctctgattgcgaacagtgcggagcctatgcatggtaaacctcccaaagcaagtccatccggtgcggggaaattgagcagcggcttgctgaccgcaagcaaagatggaatggagagctctaagccccccgtttcaactggatccagcattcagaagaagcgcattcgaattgattacgttgcttctgtgaggaaggccatcaaggacgcgcgtgacgctggcaaaagcgaggaggagaccaaagcgttgcgcactgcagcgattgagcgcgcgcgagaaaggctgcatgttccttacaagaatgcgcgcacgggaccctcgaagcccctgggtaaggatgaagtgtcgcacatcaagctaaaaatgctgaagttgctggaggaagatgcccctgctgaagagcttaccgatattatcgagttgttgctgtctctcgttatcccgcgcgccgttctaattgagtcgggtattcagcggcagttggagctgatactcattgctcacaaggacaacaaagagcttgtgcgacagacgaaaaagctccaagaagagtttcaatcaattgtggaacatggcgatgctccgagcgtcgtagcagcaatggctggggatgtgaacagcagcagcggcaagaagcgcaaggaaaaatccagatcgctactcctaagtgttgacacagaatcgttgcctggaactccgggctcttctccaagttcaggcccaacgccgtccccagagtcgcggcggccgcgtgttaagttttcgctcgctcagctgatgaagttggagaaatatttccacaaagaggacacgccaagcaaaaagaaattggacaaaattgccgcgcgactgaacggcattgcgtcccttgatccatcaagtgacgctgcacagaggtctattgactacaaacagattcgctgttggttctacaagaggcggtcggcgaaccagccccctcaggcgctcagtggcgcggatcttcatatggacgacgccgattctagctcctccagctcaagtgatactgagtctgatgacgacaaatcggagaaggggtcgaagtctcgtgcgaaggcaaaaccgaaatcctcggtgcccactcctggtggttctggctcgaagcgtaaagcgcctcaaagtgacgacaaaagcgctgccaagcgacccaagaaagatacgcctgtcgctcagcctgccccacttggatcaattagttcaccgaatgcagaggcagcttctctcaagagtgacgacgaattagccggcaacttgcaggcagggcggatctttaacgtgaagcagcttgcgacgatcatcgaagagtacgaaaagaatccgcgaccgacggtggctcgactggaggaactagagaaggtgctgaaccaagatgatcatacagacgagctgtccgttagcgcaactggcgtgacgaagcagcagatcaagacgtggttttctaaccggcgcgcgaaggagcgtcttgatctcatcaaaatgaagatcaaggagactcgagggggcgtccaggccactggctctgatactgaggatgacgagcgtgaagactcggagtcgaagcctgtggctgttttgcaagccggacatgctgctaacactattgccgggaacgtcgcttctggtgagaagcggacactcgtcacggatgatgatcctgatgaggcagaagatatgaaagttgatgcatgaataggccaagcgaaccgagctgagtagcttttgacgctctaatgtgctttacactgatgtctaagaatctctatttggtgttcttctggtctggttgtgttcggcgttagttgagctgcggtcgacgcagctcctcgattggcacgggcagtgccaccgagtcgacaagctttaccatacgatacgaggtctcgaccgaggtgatgcactgcttcaacgtcttgcacaacaccgaatcctcgagtgtgtctagctgccgcagcaaaggatagagtccgccgtactccgtgagcaattgcaccgccacctcatcagtgaggttgtccactctcgggagccttttccactgatgcccgcacagcgcgtagaagtcggggagcaacttggggtgcagaccaaaccttcctctcaagtttcgctctcgaatatatcggcgccgggatggctggtacagctccaccacagcggcactctctgacgcaacaccgccgcccgcccctgagcctgcttcttcgctgccaccgccatgcacgagctgcaggaaatcattgtcgttggaaatcagcagcacgtcgaagccagcggcagtgaactgcgacgagtaggaggcgatgatgtcgtccgcctccatccccgggcgctcgatgcagttcacgttggctgccgctagggccttcttggcgtatgcgaactgcggcgtgagcgaccgaggcgtgggagctcggtctgtcttgtaggtcggctggataattctgcgggtggtggggcgctgcctcgagtcaaacacgacggaaatgtgctcgggctcgtgcgtcttgtccatccgccgcagcaggcgcagcagaccgtccgccgcgccagtcttcactccatccctgagcatccagagcaggcaagagcgttagccgcaataataccagaagcgcatgctgcaccaccgtggacaagcccagcacgtactgctcgacgctgcagagcgggtcgtagaagtggtagagcgcgttgttgccgtccaccaccagcgtcttcttccgacaggcaggtgcgttctccgccagtgctgccgccgccgtcgcaagcaagcgccgcccgctcctcgtattggcgacacgcatcggcgctgctggtgccagcgcccgcggcagctctgcgcctctcattgctgtctgccttggaagtcattgcgcgggtcttaccctaatcttttttttaatcttttttttcagtccacaattactttaagtatggcggagaaggagtcgttcctgccggtgcggcactcgcccgcggcggccacgtcggggcgcatctgctccgccgtgacgctcttccccttctacgcggcgcagcggctgctgtcgtgtctgggctactcgcactccgtccgcatgcagagcggccgaacgtaagccggtccgctcttcttctccattaccgacttgctgccgctgactctgtctactgctgtgctgtgctgcagggtggtggtgagctcggagatcgcacagggaggcttctccttcgtgtacagggccagagacactgacacgggcgagcccttcgcgctcaagaagatcctgtgccagacggacgagcaggtgcagctggccaaggccgagatccaagcgcacaagtccttcgcgcacccgaacatcatgccgctcagtgactacgcagtggtgtcctctgggccagagaccttcgagtattatctacttttcccgttcatggaggtgcgtgctcgtgggaagctgtacaaagcgacacaaaagggctgacctgctaactgctgcttctgtgacggacagaatggaacgctgcgagaggtgatcaacactgcgatcaggtagcatgaccgatggttgagctcttcttatggctttgtttggtctgttgctaaaccgagtttggactgctgcgtgcacagtcaagacgtgcggatcccggaagcccagatcctcgacatgttcctccagatttgtcgggcggtagcggagcttcactcgaaatcgcctcccctcgcgcaccgtgatataaaggtgaaggatgtaaacatagcaaaatcttctgggacagctcgcttatgaaggttttgtgcatttcagcctgagaatgtcatgctgtcggacgagggtgagccgctgctgacagacttcgggtctgtcaccacggcagacgtaactattgcaaagcgctccgatgctctgatgctacaagagcgagctgcacagcagagctcgatggcgtatcgcgcgcccggtaagtgcatagctttcaaggcgggggtatctgacgtccaaggccaactgacgggaatgctcactgcgctgcttccacagagctttacgacgtgccggacaacgcacacatttcgagcgccacggacgtgtggtcgctgggctgcttgctgtacgccatggcgttcgggtactcgccgttcgagtgctccttctacgactcgggcgtcgtgcgggtcgtcgagtgcacgtacttggcagtcatcgggccggtcaagttcccgaagaactgctcgtactcgccaaagttttgcgagatgattcggtacgtgcaagtgtgcgcggtgggtgtgggctccgcatccgctaacgctgttcgtgccgccgcaggtggattctgacccaagacgcgacggctcggccgtccgtgttcgacgtcattgagcggttacacggccttagcgagtgaggttaccgtgctggtgtgccgttccggggatcggagcgccatgcccagaagtgattagtgtcgtcaatgcgtgcgggccgttatgcggcacggtggccggtgaaaattcagttcaacaacggatcacttcaaccgctccaaatttcgataaatatttgaaaaaatcgcaaatttcgcaaatcaaaaccacatcgagccagctggtgaacccctgacccagacgccgaagttcggcccgaagtgcaaggaagcgtggaagctagcacgcgcctccgtcgtcgtcgtcgtcgtcgcgagcgaacccgactagcagagccccgccgccgtctccgcgccccgcctccgtcggtgtattagtaccaccggtgagcgcggcaacgatgagcaaggccaaggccaagggcggcgggcagaagctgtcggacaaagacatggagcagcaccgcgagtacatgaagaagtacaagatgcagtcgagcgacctggagaggcacgagatgcgctacaaggaccactacgagctgctgggcatcccgcgcggcgccagccacacggaggtgggtctgccgccgccgatgaaagggcaggaagctcttagccaaggactaaccgtctgctactgtgtgtgtgcctatgtgtgtgccagatccgcaaggcctaccgcaagctggcgctgcagtgccacccggacaggaaaccgtcggccgaggcgctggcccgctgggagggcgtgccggcggcctacgcggtgctgtccgacccaaacgaccgcaccgagtacgacgccacgctgccgacgcgcgacgccctcgtggagttctaccgcgcctacaacccggccaagctggacaacgacaccatccagaccatcatagacggctggtacggccgagaagtggagctcttcgagatgctcaacgccaagtatgaggtggcgccgcaccaaggcacgaccaagagcgcgcagcgggcggccgccatggcggtatcgcgcgagaaggcgcacaaaatcgcgatggacagccagacgtacaagtccaaggacgccgcgaacgccgagatcacgtggacgggcaccatcggatcagccttctgctgcaagggcgccttctcgcgcatgttcagcacgacctactacgaggtggacacgaccagcccgggcttcttgggctcccatggcgcctcggacacgcccggccaggccatgcccatgaacctcgaatcgcctgcgacgccctcgcaactgtcggagcctgtgagcccggagtttgacccgcccgttgacacggagaacatgtcgaatgcgaccaccgtcgacggatcgccgcccagtggagacgagagctgtgccagaacaggcaacgtgtatggcatttcaccgccagccccgcgggcagcacagccgaacgctgcggcagctagctaaacgagttgttgcatacgaacaatccgcggtaggccgccacacgttgcgtgcatatgatgccgaataaattatcaatgtttccgaggtatatgtttctctacgctgttgcgcgcttcgtgcaaaccagtgcgactcaatagtttagtgcggtgcttgtcgccttccgatcggtgacgcggctgaccgacttacgcgaagtcggcgaggggctccgcagagagcgagagcgaccacgagatagcgcccttgctccactcgagctctgcttccttcatccattcgttcatccagctgcctttcttcaggctctcgtgggagcacgcctgggacggagcctctgcactcgaggaaacggacagctcgccctgcgataggtctgtgagggtcatatccacaaaggcggacgggtcgttccattcgtcagagctcagtggcgagggggactggtccatcgaggaagaaagcccgagtatcatgctcagtccgtccttcacggacggcacagtgctgtcctcttcgcctttcgcgactagtttcctgtatggagcgtcgttatcggtttttgcatcaggtacctgcgccacaaggctggacacagggggcagcaatactgccttgggcgtcgaaatggtcccagtctccgtgggtttgggagcacgtgcaggggcgagtacagtcttggacgctttgctgctcgtcgtcgacgacgaggtggtatcactggtcgaagcagcgacgaactcgaccctctgtccgattttcttggcgaacttgcagaactcgcgaacccagtactccgcctcggccgccttgaggtcctggatgttgaggttagggccgaacttgcagcggtactggacgtgccagtagtagtggttgcgcaggttggagagctgcttctggagcttcacgtgcagattgtagcagtaattcttgcggtgctggaaggagaagttctgcttgccgattgcctggcccgtgtactttttggtcacgcgcagcgggtcgcactgcagcatgttggccatgaagacgcgcaggtgcaacccgtccgcgagcggcagcgcgcccacctggaactgcttcatcaccatgtcggcgtacttgtgctcgtcgacgctccatttgcccttacgcgcccccgagttgggcaggcctcgggtttcacggaacacgagcatggcgcacacgggctcgtcgcagacttcacaatgcgtggccggccatgtgaagatgcagcgtgggtggaagcggtggccgcagccgtccagctccagaacggccccgcacgatttgcaggcctcgcatcgggtcgagctgtcgccgttggcgtcggaagcagcgtcggcgtcggggttcatttgccggtggtgctcgaagtcgcgcaagttgggaagtgagggcttgaagcgtgtgtcaacaagtcggtcgtggggtgaccaatcagaggcgccgatttggagaacgttcgacgcaatgggtacgcttgattggatcgtgcaactcgttgtcgaggcttcacaatcggttcttctggcattgagcggcgcccagcgattttgtcctaccacttgcgccggatgtagcaagacaatcgatgcgttggcagcggagggtttgtcacgcatgctgtcggtctgcaagcaaatgccacaatgacgcccaaagcaggactcgcttctctttttcaaagtattgtcgttgatatgattgtcgcttgaccacggccggattctttactacatcgcagtagtggcgattggtcttcgcgtggggactccattaccctcccagttgcgctgcatgtcagtagcgtgacgaggtgaacgctaaggctactattgtacagatgcattagatccacatctgcgtcggcgcgctattatcaagttctatcgcgctatatctacgaaacccaccggtatgagcccaacctagcgcagccgcaatgaaaagcgacctcgtgggcgggacgctcttcaactgtccgaagacgctctaatgctgtaccgccgtttaaacaaagccgttcttcgtttgtgtgttctttaatcgttctgaaacggtacgtcacagacaaatacgcaccgtatttggtctcttaaatgcgtttacttaaacgggaggtaaatgttaacctaagtgaagtcaaatatcactgttgtgttttacctaaacggggtccaccaatcaccttgaacacagttagtttatgtgtgtcacacgctgtggcgatcacactgtgtggccgccagcatttcgccgccgaacccccatcatctgcagcatgatctcgcgcgtggggctgtccgccgccgccaagagcggcaccgtcgcccgggcagtacgtgatgctgcgctctagatcttacgcatggtgcacctccttgtcaactaagcgttgtttgttcctcgtgtttgccgccgcagctctcgacctcggccgctggtgccacggagacctactctttcgtccaggcgcgcgccgagtaccgaaaggagatcgcgtcgctgcgcaaggacttcatcgaggaggagaagcggcgccgcgagaagctcgcgcgcgatgccgagtgagttccgccgctggctgaaaaaaaaagagggaaccgctgatagggaagaataagctgacgcgtccgtctcaattgtgtgcagggcccagcgtcagaagatcatgaaggccaaggcggcccgactagagatcaagcgccagcagcaggcgatccgcgccaaggaggtcgctcgcgagaaggccatccacgacgagaaagtcaggtgggtctcgtgggtccatcgcccggtctagctgtagcatctaccgctgataggccaagcagagcgatctgagtgcgatcactaacgcatactcttttactgctgccgcctgcaggaaatacttcgaggagaaggtggtggtgcgccaggagcgcaacgccgaggtggagcgccgtcgcgaggcgctggtggcctcgctgcgccagcagagcgccaagtggacgaccgaggagaactacacggagaagctcaaggaggacgtcttcatctactccccccagcagatctcggcccgcggctcgttcgacccgtcgagcacgtcgggcagcgccgtgtcatggctcgagaagctgcagcgcatgaagcccgccggcatgcaggacagcagcgacgaggccgccgcgaccgctgtggcgtcggcggccgacgaggaggaagccgcgcacgtctccagcgacgacagcgcggacgcgtccacgctgaagaaggacgaggagtaagcccgcagacaggggacacacgcgcggttcgccccgctgcttctaatgttggccacagtacacactacctagacacgccctgcttgcctcctacgtcgtacgtccttcgtgatcttccagttgcagcagcagcagcagcagcagcaggcacctccatttcatcgccgcagggtcatcaaccaaagttgaagctgcagtcgaacggcgcggatccctttcgtacttagtgcggacttggatttcagagggagctcgtagaatctttctagcggccgaagcgaagcagcaggagcagcagcaggattgaagcgcgatggtgacggcggagcaggccttccaggcgaacgcggcggcggtggtgcgcgactactacgtggagccgcgaatcggtgcgtccgccactgcgtgggctttggggcagtgcgccgccgcctgattgactaactgatccactcgcgatcttccgcagactaccgcacgatctcgggcgtgaacggcccgctggtcattctggagaacgtcaaggtacgctggctgccccgatgcgcatacatggtgcgctgcaaggagacttggttctttgctgacgccgcgcgcgtttcttttctcttgtgtgctggctccgtagctgcccaagttcgcggagatcgtcaacttgacgctggcgagcggcgagaagcgccagggcaaggtgctggaggtgcagggcagcaaggccgtcgtgcaggttttcgagggcacggacggcatcgacaaccgccacacgcactgcgagttcacgggcgatgtgctgaagatggccatctcggaggagatgctgggccgcgccttcaacggctccggcaaggccattgatggcgcccccgccgtcgtcgccgaggagtacctggatatcgaaggccagcccatcaacccttcgtgccgtgactaccccaaggagatgatccaaacgggcatctcggccatcgacgttatgaactccatcgcccgtggccagaagatcccgctgttctctgctgctggtctgccccacaacgaggtacactgttagtcaaagtaggggctggtaacttgctagttctgacttgtgtcgttttgtttgcggacggtgtagattgctgcgcaaattgtgcgtcaggccggcctggtgcagcgcaaggacgtcatggactcgcacgaggacaacttcgccattgtgttcggtgctatgggcgtgaacatggagacggctcgtttcttccgtaacgacttcgaggagagcggatccatgcagaagacggcgctgttcatgaacttggccaacgaccccaccatcgagcgtattgtgacgccgcgtctggccttgaccacggctgagtatcttgcgtacgagcgcgacctccacgtgctggtcattctgacggacatgagttcgtacgctgatgcacttcgtgaggtgtcggccgctcgtgaagaagtgcccggccgtcgtggttaccccggttacatgtacacggatctgtcgacgctatacgagcgtgctggtcgtgttacggggcgcaacggttccatcacgcagctgcccattttgaccatgcccaacgatgatatcactcaccccattccggatttgacgggctacattaccgagggacaggtacttgatatgtaaagccccagcgttgcggctcgcgtgtagcttactgactttggatcattgtcgctctgtagatttacgtcgaccgtcagctgcacaaccgtcagatcttcccgcccattaacgtgttgccgtcgctgtcgcgtttgatgaagagtgccattggcgagggtatgactcgtgatgaccacagtgctgtttcgaaccagctggtaagtgggttcacatactcgaaagatgcggtattcgtcgtggaatgactttttgacgatcgtttggatacgtagtatgctagttacgctacgggcaaggacgtgcaggccatgaaggccgtcgtcggtgaggaagctctgtcgctggaggaccacctttacctgaagttcacggacaagttcgagggtaagttcatcgcgcaaggaccgtaccaatcgcgtgatatctacgagtccctggatctggcatggtcgctcttccgcgcgttcccgaaggagctgctgaagaaaatcccgaagaagcacctggacacgtactatgcccgtcggacgcaagcgcgtgaagagaaggaagaggtgcgttctaagtatctacgtgtctgataacttagatgctgaccatctaaccgttgctatttcatgatttgcagtgagtgaagtcgtgatcactggtggagccctgtcttttaaggctaggtgagagcatcagtggtgttcacggcactagggaacaactaccggcgggggcttggcacgccggcaccacgcttttgtcctctttctagccctgcagtctcttcatgttgttccaaatgtgttgaagaacttcaagtaaaatgagagctgcttgaaaagttttaagttacgtttgtattggtttcgggttccttctgcctccgtcgttgagaagctggaggcggttgtgcaggctgctgccattcagggtctgtatgttggagcacgagacgacactgccgcacactgatgtgccgctttcggcacgcctcgcacatccgcttaaactttggcgtttttgctgtccaaagaatcgtgatgttaattcgtgagtgttcaacaagaaaaacaatagcatactacataccttgtggtcgagcgggcctcgccgctcgagctggcacagaagctggcatttggggccaaggggccattggcattagcccaccggcaacttggggattaaacaccagtggtgttgctccaggaaagggaaagaacatgttcaggttgagcgcggagtttgctggtggaagtgcaatcttggcaacgctgctgccggtagtgttcggcttgatgggttgggccgcagttgtgaggattggaggtggcggtggtggtaagggggcgggcattatcaaaggtgcagccgtgctgggaatcgcgagctgactggtgagtagtaagctcataggcgctggaggaggaggaggaggaggaggaattgcagtggtgcccttcgtcgaggctttcacgaaagctgcaatgtgctggtgagcacggatctggtttgccagcgccacgcccccacacccttgctgtgttgcattctctcccgatttctccgcgggaacctccaacatgccgctcgacttgtcgctcttgatggcactggcgccttcctcttcgagtacctgatgcctcgacttgatccattgctccttcgagcgctggatctcgcgcaccttctcgccagcctcaatggcggtccgcagcgcaccccgctgagccttcttcgtcattttcttggtcacctggtcagggtttatcgcagctagtgaggataaatctgcctcgtcaggttcagcggtcaggtcgaccaatcgggactgcgtcgcaggactcttttgcagcagcacgcgagcagataataagcgcaccataacacatccgcagcaattacagacacacgatcgtaccgtgctgacagcggcggcggtactgctgctgctgctgtagacgccaaacatggagtcgatgaagtccgccatctccatcaggtcccgatgcagaatgcgctggtagctggcatacgcaactcaagtcagccctctcctcgacatcaagagaaatgcatgcagacagcaaacacacgcgacgaggccttcgatgtcctgctccgcctggcactcggccgccgccgcgatcatgtcctcattgacgttcagcatctgcgtacacagcgatctgcgtgagcgcgttctcgcacgcgacggagcagcgcaagaggcagatacgtacgtctgcaaacacatccgagatggaggccacaccgccgccgtcctcgtcgtcctccgccttccactcggctggcgcgttgctcgccatggggcaaattgcattttggcgcgggttggactgggggacgaaaagcacctcaatagtggaccctatgtgagtcacttcgaagaggaaggcaagttgtcgagcacggcctcccttcggaggcgctgtacactgtagtaagactcccatgtaaatgatattaacacgccactcgcctacagcagcaaacagatcgacgctgcatgtcacccgtcgaaatcgctgtcggaaatgtcctcgtagctccagacgtccagccctccatcgacaaacaaatcctcttctgccaacacgacacgagcacgtccatggtgagcatcaacacaaggactatcgccacaatataagaaagcacggttcaccactgcaggtgtcccagtccagcatgtctgccgccagtcgctctgcctgcgagcgggtcgtctgcttcggcgccttcttctgcctcttcgccttcggtttgggtgcggcagacgcatgagtagacctagggcccctcttcttccctgccactgcatccgacgctagagcccacacatgcgctcgtcgctgagttggcttccttggcgccggcgccgacgcccgagactgcgcgtccgcaagctcgctgatctgcgagagcacgttcagctgcgatgcgggcgacagcagcagctctctgcgtggtgcgtgcggagttgaatctgctagcactacacgtaatgtattaggatccgcacaggcttggcgcacgaatggcagtgatgcactgaagctcgtccgccgtacatggttccggaagcggcgccgagctctgggaagcgctggaactcgccgtcgtcgactgccgtgtctcgggtccctgcactgccgacggttgcgtccacagacacggggacaggggcgagtcctcgcccagcaccgtctcggcgtcgctgctgttgcactcgctggccggcatcgtcaattgatccgctcaagttgaagccacccatactaaatacgaatcgtacttagtggtgtgtgtatgcgcgccggatcactccaacacagcggcagcggcacaatcgcatcggcgccatggagctgcgcttccggggcaagaagggcgcggagagcgcggacgccgtcgcgttctggtaggtggcgggatgcggagagagttaggtagggcgtgcgcatgcgtggcggctcagcgtactgatctgttctcttgcggcggccgtggcaggctctgcgaggggctgaagaagcgccgcgtgcagggcaagaagacgcagacgctgacggcggcggcgcccgagtgggagctggcgcgcgtgctggaggacgcggagctgcacttcatgaacgagtccacgggcctcgtggtgccccgcgacgaggagatgggcaagttcatctcggaccgagacgtggtgcgcctgtgcacgacgaaggagctgggcgcgctgctgcagaagttcgcgacgcgcgaccaggaggtggcggcggagatgatgaaccccaaggcggcgacgcccatcgaagcggcgctgtgagtgtgatcgcgtggctgttgatagcggcgttgcagctgctgacgattaaatcctttttgttgcttgttgccttgtgttgctgttctgacgcttgcagctcgcgcctcaagaagatcagcgtcacgaacccgacgttgaagaagctccagaagacgttcgacgaccacacgagccctcactcggcgactgcgatcagtgaggccgacgcactggaccaatctcccgaggtagatccgatattcgagagcggggagctcgaagagatcacggaggacgctgcgaaccgccccaagacgtgcgatatgtgcgaggtgtcatggcctgacgacgcggcgggaagcatgtatcgctggacgaagctggggatcattacgcaccaaggctgcgcgcaatttactgctgatgtattggcgcagcaccctgagatcacgactcgcgacgagttcctcagcatgtccaagacgccagtgtcgagcctgaacaagcctggcaccttccacgtcacggtgcatcgcgcgatggagttgcccggaacgcaattaattggaaagcaggcgccctatgcaaagctgtcgctacttccttggaaggagcccatgcaaaccaagtctgttgagaacggcggccgcaatccggtctggatcaacgcgcacgacaatgaaatgcagttctcacacatgtacaacagcaccatcactcctatcccgctgctggaggtcgaagtgtataactacaattacctggcggatgaccaagtggcttgcaccctggtggatatgagtcctctgcttcggtacccgaatattcaggccaagagatggtttacgctgtcgtctcgagctctgctcacacagagcactggccagcccaaaatcatgcttgggatcaagtttgtcccgactgaaggagagatcagtacgaccaacgcgcacaagttccgcgtccaccagctgaaatccatcggtctcgcgataccagtttgtgcagtctgtacgtacgcaggctttcaaatgtgcttggcaaccgtttgactagtttgtacggtgggcttatttttctcgtatgtatcgattgtgttttaggtgatcgatccatcatgaatgcgctgaagagtatatggggctatcggtgtgaattgtgtggaatcgatgtacacaagggctgcatgatgaaggcaacaattcagtgcgaatgtgttgcacaagaattgctgagcgctggtcaggaggaaaaagaacacgggggtacaaattttcgtgtgctaaatgacggtgtgttgcgcccggcgggggtactatatgtgcgttttcggggcttgcacttgtgcacaaagcattgccgagacgattttcacgcgaaaaatatttttgaaggggatacgtactgtcggctgaagtttgatggaatcgtacacgagaccagtccggtacttaagagtgccgacccaatgtacatggagaacttgtgcttcaaggtccgccatccgaactcgacgttctgcattgatgtgattgacttcaactcggatcagtgcatcgcgcaattgaacgtgtcactgttccaacttctccagcgtgaagcagacaagttcattcgcacaaacccgctgctgaaaagcttacgcgaccctcttcgccatttgagcctcaacaatgagacgaaccaagctgcgatcaacgattcgtgggctgctctaccgattttaagtgatcaagaccactacacgctgtcaccgtcgccagggtctaagcctcaacccggagagaagcttggctatgcgatgatcgatttggactacgtggaacacaaagaagatttgcttcgcgtgcgcgtggacaacgactcatcccttctcgagcgtgaggacaaagagttctccgtggaatctttgcggataacaatcgagcgatttggtcgcgcggtaaagatcttccaaggaattgatgccgagtatgccagtgtgatctcttggaagaacaagaagaaatctgctgtatgcttcgccatattcgtgtacggctgtgtattcgctgatttagagtacgctctgtcgtacatcttcgggggaattcttgtgtacatgctctatcggctgcatattcggctggaaggggcttttgtcgcccgttggatcggctacgaggaatacgagctggagcaagaggaacagcagaaactgtaccggccgcttgcagacttgcacgtcgcggtccacgaagcctctctctccaatgaaacggatagtatgctcatcgagtcgcagtcgcgtatgaaggatgtatcgtcctcgaagcttggtttctatgttcgaatcaagtatcgccccaacgacaaggagtctgaagcaggtgatttggttctcaacccttctggatacgacgaaactactgtcgcttggacgggtgtggtggcgaaaagcaagaaaccaaattggcgcaaaacttctttgccattggcaggtacaatgccgtccgcaaagcttcgaaaggcgcttccgttcagaaacttcagtgtgtcgtggcgtcatgaccccaggacatgtacttgcgaccagtgtgttgcctatcagcggagcttgaacggagaaggagaaaaaggtgcagataaggcgacgcttagttgcggtgttgatcaccacgcatactatttccccatcccacaagcatctcggaaaaacttttctggccgtgacgatttggtgccgtggtcttcattccctggtctacttcagtttgatttgtgtatttcgctcactggtgaagcaaaggagacgccagatttgattgctgcgacggcaacgatcccgctccggaaacttttaaagcgaggcgataactcgggtgagatgtttcttccgctgtcttcgttttctaccccaagtgccgacaaagactctgcatcttatcgctctaaaagcaccgaggcgaaagatggcgactatctgctcgttagagttgaacttcgaattccagagcaaagcaacatgtcatcgaatgacaagctgctgcaaagtgaaacctgcgaaacgcaagagctgaggccagctcaggtggtcacgacgcggaaaaagaggcctgtaagccacgtggagcgcaatttttccgagtttgtgtgcgagagtatggttgagaaggagaaatcaaagatcattggcgcgaatctcttcgacgctttctggaaagtgaaggacactgtcaggcagcttcaaaatgagattgggcgtgcatgtggtgcattggcctgtgctgagaatctcctgaactggacgcacccgtggaaaactgcaaccgctttcgttgccatcgcgatgatgacgctagtgttctcggtcgtccgaggccgctgggcaatcctcatatttggtgtgacggaattcggtgctgcgttcgtggatgatgctccgacgagcaagcgcgtcagaaagatcctctggaattacctgtcttctcttccaacggaccaggacctcatcgatctgtacgaacccgagcgtgcggtatacatgaaaaagcgcaagacgcaacaagaacaggacgaggaagttggtgtccgccttcgctatcacgcactgtggatcggcactgtttcgtcaaaagctgcaggcgaacgcaatctcaaggtctgtttcattgcagcgtcatcatcttgtctatcaccgctgatctggttgcactcaccattttcgtgctgatttggtttgtagaacttatttgtggtgtaccgcccctatcgtttcctgctgtggaagagtgaggatgatgccgaggagggatccccaccgcagctgcggttgctggtaggtgcttgatacgatgaaacttttgatcactgctttgaagtgcttatgcgatctaatttgtgtgattggtatgcgcgtagtttgacaagccgcaggccatcaccgacaaaagcgatgaaaaggtgtttgcattctgtgtggaaggggtgaacggcagtgggagtgaaggtgagaccacgagcagttgatatttaaattttcttcacgctaacggtgccatgtgtgcagaaacccgcgtgttcaccttgggctcgctggaggcgaaaaatgccctcctagacattgtccgtcagagctgtcggctgtagttcccaactcactgatatggggatagatggattagcccccgtgctttcaatcactgcttctgaccgcaagagcttccagcttgtctgtaactccgtcgatgagctcagtgatgccgtctagttgtcttctcgcggacactagcttgtcatcaatctgcgttataaccttttgcacgatttgtctcctgccggttctgaagacaacagcagcacgcagacggtctgaagatgcagcgtgttgcagtatccgctcgtcgttttctgcagtcccccagtcggctatcgtttctatcaaaatactgcgcagccactccaatgcatcgcacaacgcagttcgctcggacagctcagcggcagcttcgctttgctcttcatctggtaccgggtccgcgaggccagcgaggaagctgggagggaacagctcgtccaatgagctctgacggtcgattcggaccactctcttcatgaaccgcagcttcctcccccgaggccccgcccggtccttcccgatctccacatccacatagtcccattcgttgtcggggagcgcgaacccgtagtcaagcagcagctggaagttggagcggcgtccgtacgagttgaagacctcggcgccttgggcgaagcttgtggcgcccgacggatagaggcgaaagaggccgttgtcgttcacgtcgaagtcgtacttggtggcgacgttggtgtggttgaggcagtcggcgaagggcacaagcgccgtccagggcagcctccgcccgaacgtgcgcgcctggattgtcttccacgcgaacttgaacctgtcgaaggtgtagagcgcctcgggaaactcgcccgggtacttggtctgcagtcggaccatcacacggcggtagtacacgtcgatctctgacgtgcgtctcgccgccgcgtccacgagtcgctcgtcgtgcagctccccgagctcggcctgggtccaatcctgcacgctctcggggtacggcaggacggcgaggtacgggtggaagaaggagcggtctgcgagcagcagctcgcgcacgaggaaaagcgccagcacggggtcgtcgcgcgtgaatacgtcgcggttgtcctggaacacgcgcccgagctgcgggtcccgccagcacaagtcctccgagatgagcagccgccgcgggatgcagagcatgggctcacccgaggcgacggcggcggcggccacggtgccgcgcaggccgttgggcgacgtgaccggccactgcagcttcgggaacgtcgcgccgttgtcgcgcagccactgcaggaagcgctgctcggcggcggcggcggcggcggcggacgtcatgatgcacagtaagtgccgctcaagtcggttgcggccgaaccctagctgccacacaaaacctgccccccctggaccctaatcgaatttgaattagggcgggaatgctgttccgcgagctgcgcttctacctgtcgcgcgcgctgtcggccgaggacaaggaggagctcgagcggctcatccggcagaatgggggcatcgtgtcggccacgccggcgggcgccacgcagctcgtggactgcgataaactggacgccaggcagcccgagtggatctccgccgacttcatcaaggagtcggtggcgttccgggcgctgcaggacccggccaagtactcgggggcggtcttcacggtgcagcaggagcgcagagggtccagcagactcgtgcgagtgcgtgtgcggtactcgaacgaggaggacgccaggctgctgcacttcgccaagcagcaacgctggaaggccaccgagtcgctcgcactgagcgtctggcagcaggcggagagcgagcgcgtgacgacccacacagcgcacagcatgcacgagcgtttcaggaagcacttgcagatgacgacgcccatggagcagcgggcaatcatggccagagcagcggtagggcgaccgcattttgctttgcagggttgaagtgcagttgttttttatactgatggagctattggtgggctgcaggcgacaacacgagcaagactgctggagcgagacgcagaggtggaagagatagatgatgatgaagaccagaagaaggaggaggaggaggaggaagaggagcaacaacagcagcaggaggtagtggagccgacgcctcgagcacttgcaagtccgagccccactgggtttcggaacgtcgcgacgcccgagtcaaccccatcccgggcttcaaggtcgacaccacgttctacgactcgccaaagtgttgcaacctcggagcaggctacgattgagagccagctgagagaggtcggggaagagaagctcagcggacgtgcgcgctcgcgcaagcccaagtctccgctcaggctttcacagaggcttcaaccgagcgaaagagttcaattgagctcgagcagcgaacagaattctagcgggaacgttgcttctccagctcctactgctgcagcagctcctctatcaacaccgacggcagccccacccactcctgccagcccaccggaggttccaagcaatcaggcagctcagtcttcgccagcaccttcagctggatcatcaagctcgttgccatctacacgtagtaaccagaacgctggcagaacccagcagaagcgcaagcggagaaattcgagctctgggtctacaagcagccaggggtcaaggtcatcgcgccaagaagtggaaggaagcaatgctgaaagcattgaaagtaaaaacagcggcagtaatgggattttttccgcagtgtgtgggcccagcatctcggagatccaagcaaaaggagactgctgcaaaggttctttggacctcctgcgaaacctgcgcctcaatcccaaacaagcacagcggaatctgcgaccggcagtgatcccaatgaggctgctgggtctggtgaatctcaagtgagtgaggtgctcgacgagcgtatggacgaactggaacaagagaagatggagcaagcaacggatgaagacacagacgacatcatttgtcaccttcagatggagagtcatcaagatctgcatactgtggtccacgccctgtactactgcagcggagatgtcgagatggcaagatccttcctcaagggcgtttcacctccaagcatgtggtcccccgaggacgatcttttgcttgttgacttgctggccgatgagagcacctgtcgtgccgctgttggagcggctgtgacccgtggagacttcagctcgatgcaagtggcacgtgacacggatgcaattttgaaacgagtgcagtttcttcggtgatgatctcgcgattgcgcgagctaatatatggtacgtgcactcttctgctgtgcatggcgttcgtccagttttgtcgtcgtcttcgtcttctggttcttggatgagttcatacaggtgtgcggcttccctccgttgcactctccgtggtcgacgaagagtctgctccagcatgcgcacgatttcgcccctccagccaaaggtaaagccactcgtacgtggtcaacccacggaacgctatgtagaggtggaaggtgccgagcacgatgaggaagaacagctcgagcagggacaggatcgacagtgcgcacagtaacacggctcgagcgttcttaccttttacttcgtcgtcttgccccggagcaaggaagcgcgagatggcgtagcccgtgacaacctgctgggtcagcagcaacaggatcgagcacgagagcagaccaacgaacagcgggtagttgcgcgtgccgatgcacgtgttcaggtagatgcagtggtggtcgtatcccgggatgcacttgttgcatctaccgcaatgcctggtgtcgtaggtgagcgccatgcggccacagacgctgcaggtgacgacaactggatgcgacgtcagcatgacaggactcgccttgatcgctggagctgtgacgacgtgcacacctgcagcaattggcgctgcaactcgagtgtcctcatctgccgctctcgactgtttcggatgtgtcgcctggtgtcttggctgtcccggatcgaagcgcgagatctgcacagccacacgtaatgagccaccacaggagcaaggtcaacaggggatcacacgtacgatgacaaacagcagagtcgtgatggccagctggacgctgtagagcggcacgacggtgcgttgcatgagtcctggcagctcctgcacgctgaagccgtagaaaaccaccgccgagagcaggccgatgcccaccacctgcaggagcactcacccgtcagaagcccacccccaaagtcgaaaagcttcagctcgctgaccgctcgaacgcaccgcaatctgcgacgggtggagtggagcctcgcagccatggcgacgcggggctccaggcgccatcatcgagcaccaccggcgtctgctcgcctcttgttcaatgccgcgcttcaatcgtacttagaggaaagctgtagactggatgaccaagcggatcggggacgacgaggctctggaggagcgatccccgaccggcagcgacatgctgatgcgcgcggccaagacgacgctgtcccgcgccaactcgctcttcagcaggacgcagacgccgtgctacctgccgccgagcatcgcgggcaacttgccccacttgacgccaggttcggagcactcgaaacagcagcagttgttgcttgaggaattttgtgctgatgcagacgttgatggtgtgcagacaactgcagcaaggtcggggacttgactgcgcaggtggtggactacgccgacatgtacgccatggcttggcaactagggaggacgggctggcttggggtgggctaattgcttagcggggtgtttgatactgcagctcgggcttggtgaagctggtgtcgaataagcagcggcccttccgagagttcttgaatgtgaccgactgcgagctcgtgctctccgctagggactacatcagtcactcggtgcgtgatgccggggttcatctgtccttgtatttggctagattcactgatgttgaggtattcagaatccgccgagctccaaggcgacgggcttcatgatcgagacgagcggcgggcgacgcaccgtttccgtcgaggatttcatgcaagcgaccgagttgctgcagccagagctggttgtgccgctagctgacgagattccggttgaaaagggtcggaaccgccaccgcgcagctgtccagacctccttggactggttggacgcctgccaggctctcaatacttcgggcacgcccatgtgcggagtggttgttggcggcaacgaccagacgttgcggcggatgagtgctggtgaaacctgcaagcgcgacatccaggccatcctgctcagcggtctgggggcttgtagcgataaggcggagcgcttggagctgatcgacgccatcgtgagcgaggtcaccccggcgtcacttccccgcatcgtcactgggatcgggcacccgctcgacgtgctggacaccgtcaatcgcggcatcgacgctttcgtgtcgccctaccctgccaccgtcacgaaggcggggtctgcgctcatcttttggatcagcgacgacgaagacgcaggcagtgcaagcgaccgcaacgctgagcgcgagcgctcgggcggagtgctgcacttgcgcgagaagcgattcgcgacggactttggtccgctcatggctgggtgcgactgcttcgcctgccagaagtacacgagggcgtacatccaccacctgctgaacgtccgcgagatgctgggcgacattttgctgtacctgcacaacctgcagcactactaccgcttcttccgcgagatcaggacgtcgatcaacaccgaacgcttcgaggcctaccacgctgaattcgcgagcagattcgaggagaaggcctcgactgcaccgccgcttattatccctgcggcgatagaggaacgcaagcgcaaagtggatgcggacaaggctgctgtgaaggagaccaaagccaaagtagcagcagcacaacacgaagccgcagttttgaagcgcgcgcggccgtgaaagtgtaagccgatgtattcaggaacttaaatcgctgagcatgcaatttcattggcttgtcggcttcaacctctacacaatattgtgtaattgcggctcttcatggcgaagatacggctaaccagaaccgttgatcacatagcgatcttttctctttttttgattggcatgaagcgtgtcaaagtctgtcatttcggattcggtagaactcaagcaccagagggagaagagttggcagcttttgagcacttgagccaggcatgaggcgattccttgtgtgggcggcagtgctggcaaccgcgctgctggtctcggcaactgacaccgctgctgcgaagcccattgcgaggaagagagactcgaagcctcgcggctgggtgctggctggcgacctggccgacaacgaggagctcgtggggcaacgaaactcgggtggctacctgcgagggtcggaaacggcggcgacgttggcctacaccgacaagacaagcgcgtcgacggccgagaaggctagtccttcgtacactgccaaggcaaacccaccatcgagtgcttcatacggcgagaagacggtagctggggcaacgacgacggcttcgccgatcaccacgtcaacgggtgcagtgaaacaaggttttggggtatcaagcgttatcgttccctggggcagcgtaacggccaaggcatcggcctattccaacacggaagcaccaacgccagcgccgcaacggactgacaatactggtggaggcctgcatggtggtggcgtaaaggttgacaacccgacagcaccgacgagtgccgagaaggctactgcctggtacaataccaagacggaggagccatctaccgctccgctgaggactccattaccaccaaccgctccgtctagtgagaaggcgagcacttcgccatactcggcgacggatacattgaagcaaggcgaagttgtgtcaagcgttatcgttccctgggggagtgtgacttccaacagcaaagggtcaacaccaaccgaacgaatcgaggaaaatggagaaggtggtgcgtatggtgcccgtgtgaaggttcacgatgctattccagcgacggacagcaagggcgaagcgaagcaaagcgactccaatgtgcacgagagtccggcagaggccaagacgagcgacagcaagtttggtttctcacgatggtctccttcagtatccggagatgtggagaggacagccccctccctcggcccggattcaacctccacctccagtgactacactagcgctccactcagtggaatttccagcgcgggactgtattcgggcgcaggaggagtagcggtggctaccaagacgtcagagtaccctgacactgatgcgcctacgtggaatacgaattacggcggagacacggagaaggacaagcatgcgcagacgacagacaagagcgactcgacagctgacgaccgtggctccggtcattcagctgcaccagctcctgctgagagcacgatgacgtacaactccgaagtagactctcctgctggtgagaagacaagattccactatagcgagaatccacacacaccatccgagcacaacgaaagaggagtagaggaacaactgtcattccgagagaagtcgagttcttcaggtggtggtggtgggcaacatgaagggagggtagaggagttcaccgttccttggcgaaatgaagctcccggctcacctggttattccagaaaccacgcacttacgtcagaggccaagaagcagtccgaggggactgaacatgacgctgctaaggagacgacaaacggtgagcccgcgcacaatagtccggtgtatgatggggtgtttgggcgtgtcatcccgtggaacgacggaaaacctcaactcgtgatcggcaccgcaatggagaagcccccaccgtatcctgaccacgcggaggctgacgcatacccagaggagcagactgaatctcgagactacggtcacctcttaggtgatctcaccccgtggagagagagccactcgcttctccaaagagagctacaggcagcggacaacgagcagccaaccgagcaaccggcccctgaggtaacatccgacgagccccaagaggtatccgctgacaaggctgcggatcaaacggatgataaaactggggatcagtctgcagaggaaaagtcggcggagcaacaagaggatacgtcgacggagcagccagccaaccagcccacggagacgtcctctgagcaaccttccgagtatgcagaaactgtggatgatggtgaagtgatgaagacgacagccgttgtggatgaaaatgtgaggtggaaccaagatgactgcaatccctgcgatgtaccgacccagccaccgacgtctgctccactttaccctcggaacgacgatgactacgaacagcagcttccaaacgttaccgatgcatacgaatcgtgggaccacgtcaagcgtccggaaccagcatcgacgaagcctcccaagaagaagaagacgcacaaaccttccacgcagccaccgccatcagaaacaccgtacgagcggaccccatctccagagacgccgacggagccgcctccagaaaccccagccacgacgacgacagagctgccagcagagccgccgacagagccaccagaagaaaccccagcaccgacaacaaccgagtcaccaactgaaacaccgtatgggccgaccagtactccgcagccatccgaaccagcgacaactaccccgccaacagagtccacaccagctccgaccaaaccaagtgagactacccctgcgccaagcgagcccacgccagcgccaacgaagcccggtgaggccactccagctccaacgaagcctggtgaagcgacaccggcaccgactaaggcttacgacgattcaaagccgacgcctgtgtcaacctccaagggaacgtcgacatttccgacggggacgaaagccaccacctccaagactgcgacgcctgttgccacgactggaccttcaacgcctgcagcaacttctgttgatacttcgactgggaacacggcgtacggaacgtccggcattaccggcggctcgaacgacaatgttgttggcgcctcgacctcagagggaaacacctcgagcgggtcttctgatgcgctgagtggcggagccatcgctggaatcgttatcgcgtgcgtcgtgttcgccgccgtcgtcgtgggtgccgtgctctaccgacagcggtcgatcgcgcggcaacgcgaggagaatttgtttgcagatctcgctgctggtggcgctggacgcgccctcgagacggactatgcagcgatgtaaccaagactcaaggagtgagttgacccgccagtaaagcagttcagtttagcttgttgatcagaactcgccgaacaacaaggttttgtatatcttcccttcagttattcttcctgattgttgttgttgctgctgctgctgctgcctcttcccgccttcatcctggagggattcttggtgtcttcaggcgacaaacgagatttccccatcgtcttacttctcgctgggtctctaggagctgtggagcctgacctcttcaaggtgctggtgactcggggtctattggcgcctctgtctgcgggaggcgttcggcttggaatcgaaacgggggtctgctgcttcaacaggtagtccaaagtgaccccgcgggctttgagggcctcctcgaggcggtcgagctgcattcgagcctgcgccaggtcacgctccgctttttcagcccgaatctccaccgcatcggctgcgtcttcagcaagctgccgcagccgagtctcctgctcttgtgtctctcgtgtcacaacttccgctcgctccgcttcttgagcagcagccgcagctgcaacaagcttctccttcaactggatcacactggcctccagcgcctccatgcgccgagattcctgcgataactcgctcttgtgcttgctgacaatgttacgaagcctgtgctcgagctcgtcaactttctcccgcagctccagcttttcgtctacgagtttggtgatctgagcaacgctctcggccagcttctgtttgctcgcctcctcttcccgcaagaaagcctggtcgcgttgctcgagcttcttctgccacacctcagctacgtccgcacgattctccttggcgtgctctagtttcttcttcagctgtggcagcagtgccagttggccttgaagtttcttcgcgttgcgcgccagttgctcgttctcctggagtgcgcgctccatctcctctctcttctccttgagcagtttctgacatttgcgcttggtctcgtcgaccgcgagtttgctctttttcagcgcttcttgcaaggtcgcgatttcttggtccttcttcgctagggcagcagccgactgatcagtgatagaagcgttctgtgactcgatctccgagactcgctgctgaagctcgtccatggcggcttcgatctccttgttccgagcagtcagagtctgaatctgctgcttcagcttgagctccgcagccttgctgctgctctgctttccggcctgggagtcgttcgacctattccgagcggactcgttgccactactgcccgcgctcttctgggcagccgcgcgcagctcctctttctcctggcgcagcaaaacgagctccttcttcagctcgcgggcctcctgtaccgctcgcttcatcgtgctctccaccgctttgcgggcttcaatctccgagcgcaggcgacacttgacaagacgctgcagaggcagatcaagaagaagaagaagaagaagcaacgatgactccgttagccagtctaccttcagcatgatggagatgccaaaccaattcagcgccacgacgactcacctcgatgtcctcctcctgctgctttctagcgttagctgacaattgccccgacatacttgtccgtatgctgcgctctcttcgtgttcgcttctgctggctaaactgggtgtgttctcatcgctttcaccacacaaatgaaatgctcggtcgcaggtaggcattgttggagctctgaaaatagtcgacgaaattggaggcatcggcagcgttttgagcgtgacagatatcctggcatctcgtcgcttgagagatcagatatcggcccagccttgattgagtcaaagctctgctggagggaggatggccttggatgcacgcatcaagacgaagggtgagtttcacgtgagcacggatcgggggccaccgctggtagacctgagcttgagtgtgggtgaccagcctccgcgacaactgggcatcgagggaggtccgtttgctcggtgcggtgaatgcatctttttaccggaagtcgctggtttgtgacttggcgcatcacggttccaggcagggagtggtgctggtgaggtggcaggcactggggacgaagttcgaagacaaggtgcgaaagccttttcatcggcggtggtctctactcgctcgcagttcttccgctgcttcgatacggcccgtcctgcagatatccatcgtaatgttgaagttgagctgagtgttggtcgatgacgttttgactggtcttgctctcgcgctcgcgctagcagagctggctggacggcaagcacgtggtcttggggcagatgctgcgcgacggtctgctgggcttggccgccttcgaggccgtggggctccgcgtcgggcggccgatcgctccgggcagacgctccgaataaataactgtattgcaatttttacggtattgtttcatggcaataacttatttttactcctttctaaaacaataaagctattttattacaaatgttgctgtaaatacttttatacccatggggttcttttgcaacctgcgtaattacacatcgcttcgattgactggtggtggacgcggtgtccacgagctctagctagcgaccacactgttcccgggggctgccacggctcgcgttttgcagagtacacttctaaacctaccaagaagcccaagaccaaccacaactaccaactctacgatgtcgctcatcaagttctccagcaagagcatctgcacctacttcttcaaggtcgtcgtggacgagaccagccagcccaccgattatttccgctgtcatatgtggcaccgtgcgcaagcaggcccgggggacgggctacagcaacctactcaaccatgtccgcaaggagcaccccgactacgccaccaccatggccgcaagcgctcgctcaggagcgctgacgtccttcgtggactccaaaagccaaacggtgtacaactggctagacctgagggtcgagtgcaacctccccttctcgtttcctgagaatgcgacggtgcgcaagtccatttgcacggagacattcttgaagtacatgcgcctcgtctgcggagaggtagagaaagacgtggccgaagctcttcctgccaagtttgacatcgtctttgacgggtgcaccttcaagtcggagcagtacgtcggcgtcttcgccgtcttcccgcacgacaaccgagccgagactgtgctgctcgccatggcccctattgttgacgacgaggtcaaagaccatacggcggagagccatgtcgcgtttttgtcgaccgttctcggctttttcaatcgcacgactaacgacatcatctacgtggtcggtgacaactgctcgaccaacggcaaggtgtcgacattgcttggtgttccgctagtcggatgcgccagtcatcgccttaatctggcggtgactgcgttcatgggaaaacatgagaaggagctggaaaaactccaaatgttgatgcgtaagttgcgcacactgaatgctgctgcgtggcttcggtaagttttgcttatgttttcgctgttttcagtattttttgtcctctggttttggtattatattttccgctaaaacttctgtactttatttttgcaggaagtacaccaaccttcgacctgacttacgccaggagacacgctgatcgtcaaccttcaagatggtgtctcggttcttcgagctgaaaaagtttctggaggctgacgacgacctgtctgagctgctgccgacgcgtcgcgagatgaagaagctagaggctctactagagcagctcaaagattttgagagtgcgtccaagatgttgcagcaccagaacggcgtaacgctcttggacgttcgcgatatcttcgacgaactgatcgccatctaccctacggtctctaactacctcgacgcagacgcggatattgtcaagaaccacgagttcgaagccgcatgcgtcgctgcattgcgcaccggggccgaagagatcactgcgaagcagcgcaagctgcttgagccgtttgcagttcgtatcgatgccagccagccggacgactcgcagacagcgaagatgggctttgcggaccgcgtgatgaaaaagcggaagatcgagcgcaagcagcaggcgacattccctgccgtcaagttcgtcccgccaacctcgaactgcgtggagaggttcttcagtcgcgctaagcatacgctctcgcaccatcgccacgggatgctgccagtgaacctcggggcagttctctttttgaaggagaataggcgcttttggggcgccaacacggtaatgaaggtagttaactcgacttcgcaataaacggtttggaaagctggtattttaccagtattgaccgctgacaaacaataacttattgttatggatgcaagcatttgacgcagtaatttatttgtagagcctacgtccgtaaatttgagacggtattatcggagggtctggctcctggtgcccacttgcccccccccccccccccccccaatgttaacactatgaaatcggaaatagtctaatggtggactttcggccaatcaggacctgccagctcaaatgacggcgtttctttcgcagcatgctggtatgaaggccaatgcttgatgctaggccgcttccaacacttacttttaaacttgccatgctgtatcgccggtaaatgatacttgaaaggtaacccacagcgtacccgcgattgctgcgctgattgctcgcttgctgggcactcctcgttctgccgccatggcctcgcacgcgcgcccggaagacgacctcctgatggacgacttcctgttccaggagtcggacccgttcgcgctgccgctgctggacttcgacccggacggcgcgctgctgacgcccaccgagctggccataagccagacgctgcccttccccgacggaggaggagacgacagcagcagcagcagcagcttccagccaacgagccccgtgagcaccgacgacggcagcacagacgccgaagtgtcctcgccgctgcccgctttcgctcagcaccagcagctgccgcagttttgcgccgagacggacgtggcctcctcgcctgccgccaaggtgtcgctgctggggtcgacggcgtcgatgcactcgcctctccccagcgatcagaagctgctggcccccaggaacagtagcaacaacaccaacaacaacaacattagcagcgcgatgacacccacgaacgcagccaaacccatgcagccgaagccgatgatgccgatgctggcgccgactccgttccctggcgtgctgccttacgccatgccggtggcgtacttcccgccgctcaatgccagccagaagcgaccgtgtcctcaagtgcttcccggcgctacgacgcccaacgcggccactccccctgctgctcttcctgctacggcggctgagaacgacccgaacgccaagaagtccaagcgcgagatccgccagatgaagaaccgcgagagcgccaacaggagccgcctgcgccgcaaggcccagctgacgaccctcgcgacggaggtgacggagctgaagaagaaagagcaggagctgcagacgattatcgccgggctgcgcgccgagaacaagtcgctgctggaccagaacacgttcctgcggtcgctggtgacaagcttcaagcaggagccgtcggcgtgccagcgcaaccatcagatggctgcgttcgcgtcgctgccgccgcctgtggaccagaattgcgtcgccctgaacatgttggagagcggcaagatgaccagcgacacgcaggccgagcccatggatctgaccacgacgcggccaggcaagcgacgtgctgtgacgtccacgttgaccaccgcgagtatggcggtgtgcgcctcggttttcggcattactgtgtttgccgactacgagggcggagcggtgaactcgggcactgtccggggcgttggccgtgtactccacgaggccccgactgtttgcggcatggacgggtgctctacggacggctcgctgtctatggtgggctacgtggtagcagcggtgaggtcgtggtggcagttcgtgtcatcatcagagctggtattcggtgtgcttctgaacgtgctttcatttattgccatcgtcgcggtgtaccagctgtggcagtctcactcggtgggcgagtggtcttggaagaacccgatgcagtccaagtcggagcgccacggtgttgtttgtcggcaagccaagttgtcaccaagcaaagctgactctggtgaggagaagaagagtagcgccggtgctcgagacgtccgccttcgtgacaaactcccccgtggcaagaacagcagcaaggaagccttcatgtagtgggccttcgtgtccacattagtatcagtgcgtaatttatttcgaggctatcaacgctcaatcaatggatgtactcatcatatctttcgtcatctcacagctcttagatgcgagcccccactctatactttcttcccaaagttcatcgatcaacatgcacaccacttcaaacactgcaaggtctgacagcgccttgagaaattaattactagtaccggtagaaggacgatccgcatctgtcgtcttgcgttctaatgtccgcgcaaggagcgctagcgcacgcgtcatggcttcccgctcactcgtgcgggaggacttcgtctgcatgcttaacacggcgcgcatctccgactccttgctatcaggctccagctcgatgaaggcggcctcagggtaaatgctgcggatcacctcttccacctcctggacctccttctcgaccaggcgggtcacatcctcggcgtaccaggctaggatgagaggaaggtcgttctccaaatcctttgtttccaggaacacgggcttgtacctgttcgttcaaagcaaagcgtagcatcatcagtgccaaatatgggagcagagtaaacacgtcacaacgcttacattcgcagcagtttggcagccagatatgttccgtcaaaatcgacttcagcctgtgtttaacacaacaacaatgtcagtgaaactcgcacgaccaaaggatagctctgatctccccgtaccttgtagctgaatgtcgatggaccaacccactgggactggacagcatacacgttgtcgatggacggacgcgccagcaacagctcccgaattcccttctcgatctcgggctccacggactgacccaatagaaacttctggttcagacggatgagcgacacggcaacgccgccgagaagcacaccaatagagatacttgcgaggctatcccatagcgggttgcctgttatgtggctggctccgataccgcacccggccatgatgacacccgtgcacgccgacatgtcctccagcagcaccgccatcatgaacgggtccttcgtccgcttcacgtgctggtaaaacgacatgttcttgggcttggacgccagcaggtcctgcactgaccgcttcagcacccagccgtcgatgccgaaggaggccgcaagcacgcaccagacctcccacgacaggaagagctccttcggggggtccaaaatggtctggatgccgtggaaaatcgtcacgcccgagcccagccagaagattcccagcgccgagatgagcgaccaaaagtacgcggcgcgaccgtatccgtactggtgcttcttgtccggcacgcccgaggcctgcttcaagcccaagatgaggacggcctggttgccggtgtccacgagcgagtggatcgcttccgagagcatggcgctggagccagtcttgagccacgccagcaccttgagcgtcgtgatggccgtgttgcccgccatggcccggaacaccacgtcgcgcgacgtggagcggtacaccttgcccgggaagtaggccttgttgatgtctgtgcgcggcttgggcgtggggtacgtgggctccacgatcttggtcaggaacggctcgtcgtcgtcatcgtcgtcgtcgtcaccggcgatgcccatagttgcgctcttgccgtctttcagcttcttgccgtcctctggcgtcgtggccttggcgtcgggcgcaacagtcgccagccagcggaacgacggcggctgcgtcagcagcatcgactcgcggctacgccgcggcggcagcaccgccggcagcggcgcgcgacggcgtagcggcgcgagcgacagcctgcgcagactctgcggctgccgcagcgacggccgcgtggcccgcagcgcgcgcagagagcccagcatcgccacagagcgaatggtgatgggtaagctggccccagcttggccgtggtgtggtgtgtgtggcgcacaccacgatacaacacagatcaagcgaatgttactacaatggactcgcgttaagagcacctttaactctttcagtaccgtggctgcacaacatttgcctaaagcgcctttaagcccaacggcgcctttaagccaaaaagagggggtgaatctggggtgctgcagtgtactggagcagatccccgcaattagaaaactagcaccgagttgcggcaacgggtccatccgctggaatgcctggtgtaggacctattaaggtaatacctccgcaaaatcgcgcagacctgcttccgcgcaggtttgcttagatgagcccatgacacccgtcccactgctatccgtcaatacaaatcccttattattctgatctgtgtaaaggtttgcttctgtacacagactttgcacagattgctagggcgccccacgatacaattgaaaaatcaatattaaatttcagaatattgaaagcaggcgaggcgcaacatgagaccgagagcgagcagcgcgcgactagcggattacttcgtggaggtcgtcgcggagccagcgggtgagtgcagcagactgcgagccgtgcgcgcgtgactgacggactgaccgacggactgactgaggcgtggtaatttgcagacgcgtcgcagcagcagcagcgaggcgaagacttcgagcagcgcgtcgtgacgcggatcccgtccagcgaccacgaggacttcgcgctgcctgacggggtgccgtacgtacgttgccagcttagtaccgtgcccgattttgtatttggtgttggcacactgactggcccgactggtcgtgtgctgctgctgctgctgctgctgctgctggcagttctgcatcccggggagcgaggcgtttttcgagccgtcggtgtacgagcgcaagcccacgttcttctcctttattctgacgggcggggacggcgcccatgcctacgggttcgcgctgcacttcttggaggaatattctactgctggtgcgctgcgtaaatccgtgtctgcagggctcatggcgatctaaccgcattattgtcgctgtgttgcgtgcctgaagcttcgaactggagacctcgagtgctgtgcttgatttcgcaccacccgttcttctcgctgttcaaggagatcgttaggtaagcgatatatactgtctggtagtggccattggcgggtgtctgtgtgctaagagttcgcccgtccgtgttgactgggtacatgtagctggatgtaccgaagccggtatcttaagagggagcactcgctcgtgcagaccaagatcgcctatgcgtgtgaggattgcagctggtttctctctccaagacacgcagcatctgcgttgttatctgaacagcggctgttgagtagcagcaaggggccaatagatcggatccgcgcttcaaccccggattggaaagatacttctgacgataacaacagcgaggtccgagagcagtaccatcgcatcctcccgcagctccttcgcgaggcttaccgtccagctcagggcgatgcactcgacatacggatgcatgggcgcgagttcttccgctaccatgttcagcgggggaaggctgcgcatctggatgactactgctttcagatgctgttccagtgtttgagtctcaagaacgtcatttacatcgtcaactgcctgcttctggagcagagggtgttggttcattcgaatgtacgagcgcatataatctgttcgttgctttcggttgggaagtctaacagttgctgttgctgtgattgtgaatttagcaccaaggacttcttacaccgatctgcgaagcgctttgcgcgttgctgtttccatttagctggaggcacgttttcatcccgtttctaccagtaaagctgatcgaatatctgcaggtaggtgccgagtgttccatgtattcaacttgctgttagaatattgagcatactaattgatgcttggctgcctcaatttgttttgctatacaggccccagtgccgtattttattggtctccacactagttcgttggctacacgtgtgggatccgaaatgttttcttcatgcgttgtcgtgcaccttgacaaggataaagtcgtatccccgattttttcgcgagtcgaaggctatcctgtagactttgttttgcctcggctaccctccaaagaggttaccgtcctacttgcaacgctggaagatgtcattccaagcccgatcggcacttctcaacctcggaatcctactttggagtctccccagacggaagcaaacactgtcaatgaagtagagttgacgtttggtgaaggcccggtaagtctctttgtcagcttcttgaaggcggcgtcatcgaagtactgacgcgaatgtattgacgtgtattagcttggaatcaccttcgagtcgacccatctccgtcttctggcggctagtaacttcgatcctgaacggcaactcggtggatcagcggttgtaaaggcgctaccgagactttcgaatggacttgcaggcccagcagagcgttcaggattgatttccgctgggagttatctgattggtatcaacggccagtccacgctggacttgacgttcgaggagaccattgaccacctgtgccgagccagccgccccattcgcctgcggttcctgaacgccacgctcccttacgagaatgcgtgccatttcgctgagcgtcttcaagcgctatcgctggtttcggctctgcagaccgtacacgaaaaccagttgttgccatgggtggatacactgcgtggcgcttttgctggcatgttcgctagcattttttgcgactaccagcggtatattgatgtacaccgtcgagaagcggacactgttgatcgctcgggcaaacaccacgtggtaccgacgccggaacagtatggtcaatttcgacgccgttcgtcagcactagctttctgcgtggagtttgactgcgagtccttctgcagcgcagtaccaaccaaccagcggttcctcggcgagtttacacagactcaatgcttcgccgatttcatcaacgagagcgtaatgggaactcgccctcgcgatgcgtccatctcgatggagcttttccaggagtgcctgtaccttatgcacgaggcgagcaacccgagggctgctatcaggctcctatttgaacgggatgggtcgccaatcgagtcgaaggtgctggatctgcccatgaatcagccacaaggtggttatttggctacgaagacgaaagactttggagacgcagacttcaagcccagccccatcgatgttcggtccagctttgagcacacgggtgcgagttctgccggggaggagctgcttcaagattcgccgtattcatcgtcgcctccctcgccgctggaggggaaaacaaacccagaggtggagaaccctgaggctgaatctcttgatccgattgagacacaagaggtgttcatcgcaagatgatcggtgcctagatattatttacatcgggactccagcaaacgcacgatattgtaaatcgctgcacaggcttgttgccgagccgcttcttctctttatcgcacttatatttcgactcggaacgcaccggacaactagccactgccgccgcgcagcatgggcgacggggtgaatccggcgccacccacctgtccggcgtccgtaaccacgatggggctggttgggcggcccgacgcggagcccacggcctcgaaggcggccaagtgcggcaggtcgtcgcgcagcacctgcccaaagaccacgtgcttgccgtccagccagctcggctagcgagtcaagtcaaacgtcaaccaccaacgctccggccaacttcaacatcagcatggatgcctaccgcgccgaagcagatgaagaactgcgagcggttactcgagttctggtgcgccatggacaccgcccccacctggtgctgcatgcggtggttagtttgcgccgggtcgaacgcaacgcattcccccacacgaaccttgaagaggaagctctgccccaagcaagagacgcaagcgaggtgatattagaggatcgactagaggccaccgccgatgggaaaattatcgcacctcgtcttcgaacgtcgttcctagcgctgccactcccccagcgccattcccgtgtgtgatgtcgccgccctgcatcatgaagcctggggtgacgcggtggaagcgcgtgttattgtaccacagcgccttcaccttccctttgcccctcagttcgcctgcacaagcagcagtcgtagctgctcagattgtcgggagatagcaacaagtgccagtagccgaggcactcaccagtgcaaagtagacgaaagttttcggtcgtgataggtagctcctcatggaagagctcaatatgcagtcgtcgcgaaggctggtcacccacgcccaagtccaggtataccagcggcggcccccgatccgccccaacgtggaactcgtccttcgtcttgatgggtgcattcaaggccatccccctgcagagcttcgactcaatcaaggctgtggcgagctcctcaagcgacgagataccacgatatccgtcacgctcgacacgctgccgatgcccaatttcgtcgactatttccagagctccagcaatacttcgctgcgatcaagaccttcatctttgaagcaagcacacctagtttagccagcaggagataactcgagaggagacagcaagcagagcatacgggccagcatgccgtcagtggacgctacaaggcagcacgtggaggacatcgaggtgagtcgtcccaacgcaagatttgctcacccaattcacgtgttgaagagtgttgaaaaggtaaccccgactgacaaacaccaactctccactggcacaatcaacttgcacgcttgtcattccagcgtcttatcaagtgtcgcctgcggtcggaggtccacgcccgcaaagcagtcgaaagtgccatgaagcgcgcagtgctcgaagtccgtcagctaaagaaggaactgatggtactgcgccaggagaacgaggagctacgtgctgctgttgagacgaagccgaacaatggtggtgggaaggaatcacccatcgaattgaagaacgaccagatccaaagactcacggcacgaaacaagcagctcgagtccagtgtgctcgagcttcagcagcaagtcgcaggcctcgagccacagagcaccaccacgatcgaccagtcaactgccttagccgagaaagaccgggacatcgcggccctggaggacgaactcgcaaaaatcaaacttgtagccgacgaaaccaagcgcaagtgccaaaacatgctcaaggagaagagggatgaagcgcagcgagccctccacgagaacgagcaactagcgcgctgcgcgaaaacgctccagagccaactggcgctgctgccgcagcttaagaaacaactggaactcgcaaaggagaaacgcgctgacatggctggggcgtggcagaagaagctcgagcaacgtgaccaggaatttctgcgggaagaagaggcgagcaagcagaagctggccgagagcgccttccagatctcagagctcaccgaagaaaagctcgagctccaggagagattgaacgagctggaagtcaagcttcgtcaatttgagagcagccacaagagcgagctatcacaggaatctcagcgtacgggtgagctcgagaccagcgtaaaccagtggcaggaaagaattgttgcaaacgtagcggagccgactgaagttctggcgcgagagacgcaagaacaggagactcaactacggctcactgacgatgtggctggtgcaatggaggttcaggatggccacgacttgatgcaggctcgagaggctccgaaagctcttccatgttcagtagataggatggagctcagcagcaataacgaggatgacagggacccgtaggagagtcagatacgcgtagggtatagtttgaccggcgcgactccgattgatacctcgctattgttcacaatttatactgccgcactgccgttgctattcgccaccggatctgcatgtgctggcttgcccaacttgagactgtccgaaattggcgaggctgcacacggatcaatctcggctgtgcccccatttgttgctgtttcaaggtcggcggatataggtatcggcttggcaacaattgtagtacccgaaggatccctgtcgagttgaatagaagtatcagcgggattgccaccatcatcactcgtcgtcactccattcggcataaaactcattctcgagcttgtgcatgtttccactgagtcatcactggtcatcgctggaactgcgcacgcttgcttgatggaatccctgtgagcttgattgagatcggccgaagtcgatggtctacgttttccagaagaacagcttgcatcatcgtttaaagcctctttggtgacttcacgtggtattgcagcactggagacgatagtgccgatactcccgcaatatgtccttgtagcgacacagccatcgaggttggcactggtgcccttgttattattcccaccaccagcttcggtgggatcggtaattcccgctgcgattgcgagcttgagaccgccgtttgatgatacatcggcggtggatggaacagctttggcatcgtaagcaacgtctgccacaacaccagcgatttcagcattgctcgtagccagtactccagcgacagctatctccgaattaatatcaggcgccatagctagccgctcgtttgagttaatcgaatccttcagcataccataacccggttcattcataacacgtgacccgtccatatttttcgcgataccttcttcaccttgcttcacaaccaacgaatacgctctttcttgctgtggatccgatgccccttgcgtcgtcacatggtcgccgttgtcagtattaccaaggggatatgcaccagaagaatggacatcacatacatcgagcgaggcacgagaaccaaccgcgtcagtagctgatgttgtcccagaatcttttgccagatgacctccctcatcgttctcgttgctggctgacgtcgatgtcgatggtgcagaactcgccacagcccttccttctgctggagtcgatacttcatgcccattaatttcttggctttttggcgctgctgcccttcctcgtggtcgatttccagatcgtttgttggtcggtttcctgtgtgtccttcgaagctcgtcatcataccgagaattgagatatcgcgtacgtttgccagccacacggacttcgcgccactcctcctgtttctttagctgctcttggtacctccgccaaatctttgcggcttggtatcgcatgaagtctcgcttgcagaaaatcacaatcgtcctattctccacgcggggaggattatctgcacaagacggagcagcggcgatagctgtactcggaacaacttctgcagacgcccccacaggcgcaggtaacgcacttgaaactggctgctgctcaccacgcacaatgcccggcgcattcgatcctggctgaggcaacttggttgtacgtctccttcgtgacgatttgcctaactttccgtttgctgccttatccgtgttaagcgagggttggacgcttttcgtcgcttcaaccgggacagcgagtttaggaggctcttgtcgttgctcaaacttcccattcatcagatcatccgaaatacacgacgagttggcttgataattgacttgaacaagaacatccacctgttttgcggtcgtgacaatactcgcctgaggtagttcggatagctgctcatttgaggaagctgttggctctgaagtggcctgtatcggtatgctgggcacgctggtgcctacggactgttcctgagtccgagactctggtgggaatccggtcttcttccttttgtatgagcccctcttctgcttcacaggggtcgcttccgcagcgacaagatccacagacttgttgctggtttggcgagcaggaacctgggccgcaagaatcgacagttgtggctcaggcgtttgaatccccggagttgacgagttcgcagctgtagtgccagatttttgctccagtgcccgagcagctctagactccatgaacgctagatacatgggagaggctggcttgctggccaatgcaggacccccactcggtgctagacttggattttgactcggccgtaccgatctgttcatcggtggatgttggggtctttgctcgtttggttgctgaggcattctctgccgcttggccggtgttttcttcttcggcgccttgcgcttctggggcgctcgctgctggttgccccgtggccggccccgtgacttgtccgccttagcctcatcaccattgagcaaatctcgcatagtaacgaggcgtatcggctgcgacgccaacgataccccaggtacgatcacagcgccagtcggtgggactgtcgtccgagactgcacttccatttgcgtttgcatgcctagaggcggctgtgcctgggtccgatactgcgtcggtgcgaactcaaacgcgttgccacgagcttcgatactttcacagttagacctggctggaacagcagtggatcgcgtgggggcttcaccaacagtctcactgctcgcagggaagtgcctcatgattccatccaagaaaaagacgtcgggaacggattggctcgcatgactccgcgcgggtggctcctggtacttccgttcactaggctcagcagcgtaatatggttgcggctgctgctgttgcggcacaaatcgcgggtcgctctgcatctggaacgactttgtcctagctgcctgcatccctgagagtgacatcgattcacttcgcccccacgactgcagcgcacttgccccaaagagattagtacttctcgcccggaaatgtgactgcgctggcttcggcatctgctgcggagcgaacagcgcgtcgtttctgtttgccagcatccctgccggtggtgagccttccccataactaatcgcggggtacgaacctgtgcctgtcggagtcgtcgcgggccttatcggcaccggctgagcacgttgttggaagtctccaccgtaaaatctgccgttctgctgcatctgcactccatgctgcatcgcagccccttggatcctgtcactgtccgcgccgctgaagctcgacgcagccgacgactgcgcgtacgcaccgttattccatctcgtctggtcaaagccaccgaggccggacgaggagtaccggggctcctgtatcctctccacctgcctctggacctgggcctggtggtgcctgtgagcctgttcctgctgctgctgctgaatctgcgcctggagttggtgcagctgcctctgcatgtcctgctgctgccggctctgcgtcaccgcctgcagctcgcgctgctgctgctcgagctcttgcttggtgcggcgctgctgccagtcgtcgctggacgtcgagggcgcgtgcatccccacgagcaccgacgccgcgtcgctgcgctgcaccgtcatgggcaccatgtggtacgtgccgctggacgggtacccgaaggcggagaagccgccgagctgcggcacctcacggctcctttggtcgctcgggcggtacagcggcgcctgttgctgctgctgctgctgctgctgtagctgaagcgggtggcggcgctgcgtcggcagtggctccgtgtcgtggaaggcgcacagcgcgcgcgccgtctcctcgtccgacagcgacgacgccgtgccccacgccgggtcggccatggccaagcaatgcactcgataactgggctgcaaatcgcttctctcttggttttagtatgggagggccccgctatataagactgactgacggacgcgcgctattaacgttagttaggcgtggccgagctccttgagcgagtgctgggccgagccgcggcgcagcggcttctgctgcgactcgtgcggcgaccagccgatgaggtagatgacctggaacgtggccggcaccgtgccgtcgggctggccgaacatggactggtagatggaggcggcggccagcagcgagtcgcgcgaggcgggggcgccgcgcgactgcacggcgtggttctcgcccatgccgcgcagatgctccatgagcacgaaggcgttcgggtagtccacctggatgtagtccgtgtccactgcgtgcgcaggatacggtagtagcggcggtgaggctcacatgacagacaaccagaccgataggtaggaaggaggccgcacctgtgcacaagttgaagcccgtggccgacagcaggttgccggcgtcggcgacgttcatgaagggggaaatgtgcggcgagatgccgccctgccgctcctggtcgccgaggatgaaggcgctcctgttgcgggggggggggggggggtaacacgccgcgatcagtacatgtgctcaaggcgcgcattaccagcgacgagcgcaacgtaccgcagctcctgcagcgagtctccgcccagcacggcgccgatgaacgcgccgtcgggcttgagcgtgtcgagcacctggtggaaggtgctctcgaggtcgttcacccagtgcagactcagagagctcatgaccaggtcgaagtggtgcttggggaacggaaggaactcctcgtccaccaccatgcgcgccgtctccactgcaggcacataaacaccaagcgaacgagcgtcagagcagctcaatagctactggtgcagtagcaacacaccacgtacgaatagtgctctccgtatccagttcatcgcgcaggagcaacttctctacaagtaggcacaaaggaacagatccagttagccgacgaacggagccgatcctccgcaacgcattgtacgcgccagcggagtcgcattggatcagcttcttgacgcctccgagcccgtcgtccacgctcaggttcttgtagaggtgcccgcttccgcagcccaggtccagcgccaacgggaactcgcgctcaatgtcctgccgcgcagacagcaccacagccacacctctgtcaccttcgtgctcgacgagatttcaatgccattgctgttcagtggccacacacacctccaggcggtcaatcagccggcgcgcgacctcgtccttgagatactcgtactcgtcgctgttctccaggagcgcggcgttgttgcgctgctgcctcttgatggctgttgcgagcagcacacagagggatggtccttagtccgtccgcccaagaggcccagggctcccctcaccatggagctccagccacacacacgcacctcgattgaagatcggcgccgtggagaaggagcgcttggccacggagcgctgcgccagagcagcgatgcggttctgcagtggtaggcacacaggaagcaacagcagcagcagcagcacatggggtcagacggagaggctcgtactcatgggcagacgctcgccgcggcgagtatcaaaccatttgtgcggcgctgggctcttgttacgagtgaggaacgaaaatggccatcaaatggcggtggagacatagacgggaggcggcaaagctgctgcaaggagctaccaacgacaaggctggacgccgcggatgataaaggaagagataaatgcttattcaatgcttaaacggtggatcgacgccgacaacctgtcgtctggaagagcgagagggaggaagttgacactatgatcccttgctgccaacgcctgcgacggtcctgcgccgctcgccttcttcgcctgggccggcctcacactcagtgcttgctggagcccttgccgcgccacggcgcgctgtcgctgaagatcgggatgaagttgttgatggcgtcgcgctggttctgcacgatgcactcgcagatccacaccaggttgcgcacctcctgctctttgagcttcacgtacgcgtagaagcaggctgcagcaaggcaaacacgactcgagtgagcgacgacacaacgccttgcacatttactgagtgagaaccgcaggacgaaacgtaccgaagtgcatttggctctggaacgctagctcggccatctgcacgtcgcgctcgtagaaggcgtcgtcgatcgacttgctgtccacgccctcgccctggtggacctcccagatcttgcggtacaccgggaacgagtccagtgccgcacccagcgccgattcctcgccggcttccgccagcagcgctgttgcatcggggtatagcgcgccaatggacgggtacagcggcttgcggtccgaaatacgcatcgcgggctacgatcgcagacacacgaaaggaatggtcagtctccgagtcttgagcaagatagatggtaggtagaagaatgcgtacctcgttcaacggcgtgccgaacgagttcagcgtgatgttgatagcgatgcggtcagctcgcgccgcgaggatctctcccatgatggcggccgtctcgcctccaatctcctgcagtcagtcgacaaaaggaagtgttcgtcaacgatctcttggaaagaaaacaaatgacgtcgtctagagcggcgcacctggcagaagttgtagaaatcttcgagccagagcttgagcatgctgttcttgatgagctccatctgcacttcctccagcacattgcgcacgtccgacgtgccttccatgcggtcgccgccggcgctctcctccaggaattggctgaagtacgttcctgcaacattgaatgccacacaacatcgtgagacccacgaggaacaggcagacatttacgtgaacaggatcgtaccgatgggggtatcgatcagcacagtctcgtacaggtccgagtagcccttggcattcggctcgaacgtgcaaatgctgcgcatgatggactcgttgaacttgcccagtgggtggagctgtcgacatcgcattttcagacaataaattagactcagcacagtgacagtaactcagcacactgctaattccgtctgtccgcacctgcccgatgagctcgttcacgtcgcgtccgttaagcgtgcccttgaggagcaggatcacgttgtcgatcatgtactcgtacctacagcgcagttacaagttagtcagtgacccttacgcatccacgtctgcagccagacacgcacgtgatgaagtccaggaactggcccagcggctccatggcctgcgcgcgcaagaagttgaactcctccaccagcttgttggtcgtaccggcctggatcaggccgggcgagatggtgcccgactgtagcagcagcagcaatgtcgaacagcatcaaagccgtcagttctaggagctcttctcctcccccttttctctctacgccctcctcccttctactgccgacgcacctcgtccgccaggaactggtcgtagtccgtctcctgcaggttcagcttcacatctgcacgggccagcagcgacgatacgttagctcttctcctcctattgccgcctgcagtcctgcttcctccaaccttcgaggctctcgcactgcgtgaggtggtggtagtccacgtcgtccaggaagcccgagcggaagccgcgcaccaggccctccacgtagccgtgctggatgttgaacgtcgtgatgtcccctgccgccaccgccatagtctcttgggtgtgcctcgaagagctcccttacaagaatctttcgaaacgccaagtacaccactcggtaactttcacttatgtgaaccactccatggcaaagttgtagagtggagtatatcgttgcattatcggccacacacagcgtatcatttcgctacgatcgacatgttgcgctgccgcctgcgtggggcgctgtcggcgcggcgcagcttcgcgacggcgtcggctgccgcgtcctcgcgcgcatgggagcccatcgagaccaagtggcagaagcgctgggcccagcaggagctgcagacgccgacgcccaacagcagcagcagcaccggcggcaaggacccattctactgcctcgccatgttcccgtacccgtcgggtgagtgctgcaatagctcttgctgaggatggaagtgctattgcaattgccatttctattgctactgcctgccattggcgactaactgactgactggctgactgaatggatgacgctgccaggccaactgcacatcgggcacgtgcgcgtgtacaccatcagcgactgcatggcgcgcctcaagcgcatgcagggctacgacgtgctgcaccccatgggctgggacgccttcgggctgccggccgagaacgcggccatcgagcgcggcatctcgcccgccgattggaccgtggccaacatcgcgcaggccaagcagcagctccaggcgctcggcatcaagttcgactgggaccgcgaggtcaccacgtgcgcgcccgactactacaagtggacgcagtggatcttcctgcagatgttcaacaaggggctggcctaccgcaaggaggcgctcgtgaactgggaccccgtggacaagacggtgctcgccaacgagcaggtggacgcagagggccggtcctggcgctccggcgccatcgtagagcagcgctcgctgaaccagtggttcctgcgcatcaccgagtatggagaccggctgctggacgacctggacaaggtgcgatgagccacacaatggggatcacggctgtctagggacttgagctaacctattttgtattgtgcgatgcggtagctcaccaagtggccggatgccgtcaagcgcatgcagtcgtcgtggatcggacgctcgcagggatcgcaggtgcagtttcaggcggtgctggatgccgatgccacgcagccgatcccgttgaccgtgtttactacccgtgtggacacgctcttcggtgtgagcttcgtctcgatggcccctgacagtattggagttgaggctctcctccctcatgtccccgcagcccaacgcgctgctgtcgacgcctacgtcactaaggtgcgagccatgagcaaggacgaccgaggcaagggcgacacgacggctggagtgttcacgggtctgtatgcgtgccatccgctcacaggccgacacgtgcctatttacttggccgagtacgtgctgccgcattacggcacaggcgtggtcatgggcgtgccggcgcacgatagccgagacctcgcattcgcgcgccaccacaacctagaagtgcgctctgtggtggggagcagcgatggatctgtctgcaacgaggacgaggtgttcacagagcatggagtgctgcgcgacagcggcgaattctctggtatgacgtctcaggaagcaagctcggccatcaacgctcgcctcgaggaaaagggcgttggcggtgccacgacgcagttccgcttgcgcgattggcttgtgtctcgtcagcgttattggggtacgcccgtgccgatcattcactgcccgtcctgtggacctgttggtgtaccaactgagcaacttcccgtcgagctgccgcctgtggggcaggatgtcgctgacgacctgcgcgggaagggaagcagcgactctcctctggcgcgtatggctggctggaaacactgcacgtgcacacgctgcggcggcgaagcagagcgcgataccgatactctggatacgttcgttgacagctcatggtattacatgcgttactgtgacgcccgcaacgatactgctgcattcgagcctgagcaagcgcggacgtggctgaagaaagcgggcgtggacctctacattggaggcattgagcacgccattctgcacttgctgtattcgcgcttcgtgaccaagttcatgtgcgaccaagggttcctggcgacggacgagccgttcgcgcagcttctcgctcagggcatggttcttggacgcacgcacaagtcccctggctcgctgcgaccgcttgctcctggcgagtacgaggaggtgacgactgatggacgttcagtcgtcgtagaaaagaagagcggtctgcccgtggtgacgctgtgggaaaagatgtccaagtcgaagcacaacggtgtggacccggagcagattcgtgcacgtcatggagccgacgtgacgcgcctcgcggtgctcttcaaggcaccgccagctcacgagctggagtgggacgaggctgacctcgctggtcaatcgcgctggctggcacgcatttggtcgctgttggatggtgctttgacgcaccgcggtgaagttggatccgttgcagaggaggaagaggagaaggagcttcgacacgagctgcacggcacgatcaagcgtgtaaccgaggctctgaatgactatcagtcgttcaatgttgcgattgccgaactcatgaagctgtccaacctgctcggagagcgtcgcacgttgcttcagggctccgccgtgtatgaggaggctctgcgggcgctggttcagatgctggcaccgttggcgccccacaccgcagctgaaatgttccaggtcctgcaagacggtgacgaggcagccgatgtgcatgcgtgtgcgtggcccgcgtatgacccggctctgttggaacgtgctcaagtcaaggtggtgctgcaagtgcagggcaagccgcgcgatacgattctcgttgatcctgccctgctggatgcccgagactcggaagccgtgctggcgctggcactagcctccccagctgtgcaacgccatttgcagggccgcgacgtgcgcaaggccattctcgtttcccccaagaagcagggagcgcatggactgctgaacattgtggcaatgtagacgcgttctgttgccgcactgcggtgagactgctagttagttgtgttggatgggcaaacgacattcatcgacgaatataccgtgagagatccttccaacatacttttctccgtactttaacttagtaattcgatcacagggtagcgctacatcctatcgacgggatgaaagtccctgttcatcttgccgacaagcacaagccgtggaagacaccatcgtgtaaatgcaaaatatgtatatatattcattgttttattgtttttcatgcaaacatgcacctcatagaatatgcaggacctctttcagtccatcttagtacgtcgtcaagtcgattttcttccacaccgctccgcctccacagaagtagatcgcattcgtatcataccgaagcgttccagtggtgcacgtaccgcctcccgttggaacggttgtagtaacgctaccatcgaaaatgacatcaccaccagtcaacttcagattgggcgacgaaagcgtcagtacgttcgacgacccggtttgtgagtggacgatcgcagcctgcgcagcactcatcgtgagttgtccgaggacattcatcgcgagggctttcacgacgcttcctgtcacgtccacatacaaaacgtctgtcgatgcgtccttggacacgcggaagtcgtgcgagtccacatgaagcagaccgcccgaaacagtcgtcgccgttccggcggtaattacgactgccgatgccgaggtcagactaatcgtagacgttgtggagctgaaggccacagcagaactactgcccgtaagctgagtgctcgtaaccttgagaatgtccgctgcacctgcagtggccttcttcacgtaaaatccgccatcattcactgccgtcgatcctgcaccgatataagcatacacggagccgcctgtgccggacgtaccggcgccagccgtcagatcgaccgagccaccaatgccagacgccgcagtggttggaccagccgctattgatacagctccgccgttgccagtgtttcctcctccaaccgacaaggcaactggtcctcccactccgcctacgatggcgccaccggtactcagcgtgatgccgccgctattggcactagtcgatgtgccagtggacaatgtaatcgaaccacttgaagcccccgaagcgcctgtgctagtcgtcagcgatatggcgcctcctgctgcaccagtgctctggccactcgttagcataacatcgcctccgtttgctgaggttccaccgccgccgttgatattaacgcagccgccagaggtacttccactgccgccattgatgttaacactgccgccagatgtgcttcctcctccaccactgagtgaagcagtcccaccgatcccagctgtagtcgatcctgctgaggctgtccagcttccgcctaaactggccttgccgggtccaactgacagtgtcatactgccagcaagtccattcgtcgatatgcccgtggacaatgtcaaatctcccgtgggcccagacgctgttccagagcccaaggaaacatctccactaccgccagtcccaccggtggctgacacaatttcaagtagcccactggagctgctcgtactcgaaccgctagtgatcacaacgtcaccaccgttacctgtcgaaccggagccgccagtgagtgttgccttgcctccaatcgctcctcctcctgcggtcatagtagcatcaccaccagttccgcctgtgctctgaccagcagagaggtccaagcctccaccaacaccagtcgtaccagcgccaacggatacggatatcgctccggccgtcccgctgaaagtggctcccgacctgatcgagatagctccgctgtttccggacgtagctgttcccgtctgtacccagagagcgccacttgcaccaggcactgtcttggtagcagacgcaatagtaacatctccacttgctgcggatgatgaactagtgccacttgagagggaaatagacccacccgttccgccgctgctagtgccagcttggaccacgatggctcctccaccagcgccaccattgccagatgaaattgacacttggccacccactgctgctgttgcggtggctgtcccagatgccattgtcagcgcccctccagctccgacagacccagagccaacttggatcagtatgtcgccaccagtgccaccgacagcattacctgtggatagagttagagatcccgaactaccggccccggtagtaccagaggccaattgcacgttaccactgacaccattggtgcccccgttcgcgctcaggatatcaatttttcctgagcttttggtggcccccgttccactcactagcgagatgagcccacctgtcgccgaagttgaatcaccagaagccagtgtgataccgccaccgatgccggcacctgcagtcgaatccgatgcagcaccgccaactaacgagatgccaccgccgttcccgacagaacctggtccgactgacaaactgatcgaacctccagcgccaccagcagtagaagcacccgtagacaagccaattgggccgctagaccctgcattagcaggacccgatcgaatcgtaacagcaccgctcgagcttgtggctgtagttgtgctaatcatcgagcctgtagtcagtagtaaagatccgctagcaccgttcgttgctttcccactcgcgatcgaaactgcgccaccagcgctgcctccggcaccaccggtgagctccacagcgccgccagagctgccaccactaccgccagacacggacactttacctccaccaccagagctatcgctcgtcaaaccgcccttgatagacacagcaccgccgactcctccggtgcctgttccgtccccaccagctacagtcaccagtccacttacacctcccgtgctcgctccggatgccattgttactgctccggacactccagcactacttgtaccagagcctactgtcacttggccagatattccgctgcttgccgatcgcaagtagatttcaccactattcgacagtgatgacgacccactcgaaatgtcaacctgtccaccagcactcgcagcagtggtcccaccagcagcaactttaattccgccgccaattccagttacgccgttaccagcagagactgtaatcgaaccaccagcgccaccagtagtggacacgcctgtcaacaaactgattgagccactggacccggaattcgcaggcccggaggctatcttgatatcaccactcaagctcgtcgctgcagctaggtcaatcaatgaaccagtgctcagtgttatacctccactcataccactcaatgctttgccgctcgcaattgatactgcaccacctgcactgcctccaacaccaccagtaagctccacagcgcctccgttgctcaaactaccgccgataccgccagacacagacactttaccaccaccaccagagctatcgctcgtcaaaccgcccttgatagacacagcaccgccgactcctccggtgcctgttccgtccccaccagctacagtcaccagtccacttacacctcccgtgctcgctccggatgccaatgttactgctccggacactccagcactacttgtaccagagctaacagccaccatacccgagataccaccagttgctgaacgcaagtagacttcgccgctattcgatagtgatgatgggccacttaaaatgtcaacctttccacccgagctcgcagccgtagtcccgccagcagtaagttcaatcccaccacctgctccagttacaccgtttccaacagaaagggtaatagaaccaccagcaccactggcagtagaagtacctgtcgacaaaccgatcgggccactcgaccctaaattcgcaggtccagatcgaatcgttatggcaccgctggagcctgtagctgaagtcaaagatcccgttgtaaacaacatagatccagtagtaccactcgctgccccaccagttgcgaccgacactgaaccaccagtactgtctccagcgccacctgtgagctcaagcgcgccacctgtaccaatgctgttaccagctccgcccgaaattgtgaccttgccaccaacgcccgatgcatcgttggtcaacccgcccttgatcgacacaggacctccgactccaccacttcctattccgtctccaccagtaacagtcaccaatccacttgcaccacccgtgctcctgccagacgccaatatcactggtccagacactcctgcactgctgtcaccagaactcacactcacggcacctgaggtaccaccaccacgcgatctagctactacggacccactggcatatccaggaccgccgccaccactagtaacgtcaacagttccgcccgataaatctgagctgctccctgccgtgagcgacaccttgccgccgttgccgaccgagccgtcgcccacgctcaccactacagacccgccgctgccgcccgtgctcgcgccgctgctcagcaagaggctgcccgaagacccggcagccgcgttcccgctactgaagctcagcacgccagaacgaccggcagtgccgcccgtcgccgtgcccagcgaaatggacccgctcgtgctgcccacgctgcggccgctcaagacactcaccgagccgcccgtgccgctcgtcgaagacgacaccgccgtcgagtcgcctgcccacagcgagatggcgccaccggacaacgcgtctccagcgcccaccgacagcgagatcgacccgccgtggccgcccgtcgacacgcccgtgctcacgctcaccgatccgctgtcgccctcgcgactagtaccgctcgatagacgcagactgccgctcacgccgctgctgctcgccgagctcggagtcgtcagcgagatgtcgccgctggacgtcgtcaggcccgcgccgctctgcagcgagatcgacccgccactcgccacgccactgccgccgctcaacgaaatcgagccgcccactgtgcccgtggtggtatgcgtgttgcccgaccgcagcgagatagacccgccagcaccactgctgcccgtgcccacactgagcagcacggacccgccgttgccgccggtgctgccgccagtgctcaccgtcacgtcgcccaccgtgcccgccgtcgcagagcccgtctccaggcgcaccaacccagacggaccgctcgagctgccgtccggtgtgcgcaccagcacgctgccactcgtgaagctgctgctcgcgccgctagatatctccacagcgccgcccacaccactgctcgcggtgccagcaacgccgccactcgtactgccagcagtcagcgacaccttgccacccgctccggtgttgccaccacccacggacagctcgatgttgcctcccctgccgccagtcgccgcacccgtcgacacacgaaccgacccgctcgacgacgacgaggacgcgccgctcgccacagacaaagccccgctcgcgccggacgtagcactccacagcgacacgtcaccgctcggagagctcgtccctgccgaagcaccgctgatcacgctgatggatccgcctgtcagcgcgccttggccgccgaacagctcgaccgagccgccgctggagcctgtcgtactggccgagctcaggccggccgtgagcgacaccttgccgccgttgccgaccgagccgtctcccacgctcaccaccacagacccgccgctgccgcccgtgctcgcgccgctgctcagcaagaggctgcccgaagacccggcagccgcgttcccgctactgaagctcagcacgccagaacgaccggcagtgccgcccgtcgccgtgcccagcgaaatggacccgctcgtgctgcccacgctgcggccgctcaagacactcaccgagccgcccgtgccgctcgtcgaagacgacaccgccgtcgagtcgcctgcccacaacgagatggcgccaccggacaacgcgtctccagcgcccaccgacagcgagatcgacccgccgtggccgcccgtcgacacgcccgtgctcacgctcaccgatccgctgtcgccctcgcgactagtgccgctcgatagacgcagactgccgctcacgccgctgctgctcgccgagctcggagtcgtcagcgagatgtcgccgctggacgtcgtcaggcccgcgccgctctgcagcgagatcgacccgccactcgccacgccgctgccgccgctcaacgaaatcgagccgcccactgtgcccgtggtggtatgcgtgttgcccgaccgcagcgagatagacccgccagcaccactgctgcccgtgcccacactgagcagcacggacccgccgttgccgccggtgctgccgccagtgctcaccgtcacgtcgcccaccgtgcccgccgtcgcagagcccgtctccaggcgcaccaacccagacggaccgctcgagctgccgtccggtgtgcgcaccagcacgctgccactcgtgaagctgctgctcgcgccgctagatatctccacagcgccgcccacaccactgctcgcggtgccagcaacgccgccactcgtactgccagcagtcagcgacaccttgccacccgctccggtgttgccaccacccacggacagctcgatgttgcctcccctgccgccagtcgccgcacccgtcgacacacgaaccgacccgctcgacgacgacgaggacgcgccgctcgccacagacaaagccccactcgtcgacgacgaggacgcgccgctcgccacagacaaagccccgctcgcgccggacgtagcactccacagcgacacgtcaccgctcggagagctcgtccctgccgaagcaccgctgatcacgctgatggatccgcccgtcagcgcgccttggccgccgaacagctcgaccgagccgccgctggagcctgtcgtactggccgagctcaggccggccgtgagcgacaccttgccgccgttgccgaccgagccgtcgcccacgctcaccactacagacccgccgctgccgcccgtgctcgcgccgctgctcagcaagaggctgcccgaagacccggcagccgcgttcccgctactgaagctcagcacgccagaacgaccggcagtgccgcccgtcgccgtgcccagcgaaatggacccgctcgtgctgcccacgctgcggccgctcaagacactcaccgagccgcccgtgccgctcgtcgaagacgacaccgccgtcgagtcgcctgcccacagcgagatggcaccaccggacaacgcgtctccagcgcccaccgacagcgagatcgacccgccgtggccgcccgtcgacacgcccgtgctcacgctcaccgatccgctgtcgccctcgcgactagtaccgctcgatagacgcagactgccgctcacgccgctgctgctcgccgagctcggagtcgtcagcgagatgtcgccgctggacgtcgtcaggcccgcgccgctctgcagcgagatcgacccgccactcgccacgccgctgccgccgctcaacgaaatcgagccgcccactgtgcccgtggtggtatgcgtgttgcccgaccgcagcgagatagacccgccagcaccactgctgcccgtgcccacactgagcagcacggacccgccgttgccgccggtgctgccgccagtgctcaccgtcacgtcgcccaccgtgcccgccgtcgcagagcccgtctccaggcgcaccaacccagacggaccgctcgagctgccgtccggtgtgcgcaccagcacgctgccactcgtgaagctgctgctcgcgccgctagatatctccacagcgccacccacaccactgctcgcggtgccagcaacgccgccactcgtactgccagcagtcagcgacaccttgccacccgctccggtgttgccaccacccacggacagctcgatgttgcctcccctgccgccagtcgccgcacccgtcgacacacgaaccgacccgctcgacgacgacgaggacgcgccgctcgccacagacaaagccccgctcgcgccggacgtagcactccacagcgacacgtcaccgctcggagagctcgtccctgccgaagcaccgctgatcacgctgatggatccgcctgtcagcgcgccttggccgccgaacagctcgaccgagccgccgctggagcctgtcgtactggccgagctcaggccggccgtgagcgacaccttgccgccgttaccgaccgagccgtcgcccacgctcaccaccacagacccgccgctgccgcccgtgctcgcgccgctgctcagcaagaggctgcccgaagacccggcagccgcgttcccgctactgaagctcagcacgccagaacgaccggcagtgccgcccgtcgccgtgcccagcgaaatggacccgctcgtgctgcccacgctgcggccgctcaagacactcaccgagccgcccgtgccgctcgtcgaagacgacaccgccgtcgagtcgcctgcccacagcgagatggcgccaccggacaacgcgtctccagcgcccaccgacagcgagatcgacccgccgtggccgcccgtcgacacgcccgtgctcacgctcaccgatccgctgtcgccctcgcgactagtaccgctcgatagacgcagactgccgctcacgccgctgctgctcgccgagctcggagtcgtcagcgagatgtcgccgctggacgtcgtcaggcccgcgccgctctgcagcgagatcgacccgccactcgccacgccgctgccaccgctcaacgaaatcgagccgcccactgtgcccgtggtggtatgcgtgttgcccgatcgcagcaagatagacccgccagcaccactgctgcccgtgcccacactgagcagcacggacccgccgttgccgccggtgctgccgccagtgctcaccgtcacgtcgcccaccgtgcccgccgtcgcagagcccgtctccaggcgcaccaacccagacggaccgctcgagctgccgtccggtgtgcgcaccagcacgctgccactcgtgaagctgctgctcgcgccgctagatatctccacagcgccgcccacaccactgctcgcggtgccagcaacgccgccactcgtactgccagcagtcagcgacaccttgccacccgctccggtgttgccaccacccacagacagctcgatgttgcctcccctgccgccagtcgccgcacccgtcgacacacgaaccgacccgctcgacgacgacgaggacgcgccgctcgccacagacaaagccccgctcgcgccggacgtagcactccacagcgacacgtcaccgctcggagagctcgtccctgccgaagcaccgctgatcacgctgatggatccgcctgtcagcgcgccttggccgccgaacagctcgaccgagccgccgctggagcctgtcgtactggccgagctcaggccggccgtgagcgacaccttgccgccgttaccgaccgagccgtcgcccacgctcaccaccacagacccgccgctgccgcccgtgctcgcgccgctgctcagcaagaggctgcccgaagacccggcagccgcgttcccgctactgaagctcagcacgccagaacgaccggcagtgccgcccgtcgccgtgcccagcgaaatggacccgctcgtgctgcccacgctgcggccgctcaagacactcaccgagccgcccgtgccgctcgtcgaagacgacaccgccgtcgagtcgcctgcccacagcgagatggcgccaccggacaacgcgtctccagcgcccaccgacagcgagatcgacccgccgtggccgcccgtcgacacgcccgtgctcacgctcaccgatccgctgtcgccctcgcgactagtaccgctcgatagacgcagactgccgctcacgccgctgctgctcgccgagctcggagtcgtcagcgagatgtcgccgctggacgtcgtcaggcccgcgccgctctgcagcgagatcgacccgccactcgccacgccgctgccaccgctcaacgaaatcgagccgcccactgtgcccgtggtggtatgcgtgttgcccgatcgcagcgagatagacccgccagcaccactgctgcccgtgcccacactgagcagcacggacccgccgttgccgccggtgctgccgccagtgctcaccgtcacgtcgcccaccgtgcccgccgtcgcagagcccgtctccaggcgcaccaacccagacggaccgctcgagctgccgtccggtgtgcgcaccagcacgctgccactcgtgaagctgctgctcgcgccgctagatatctccacagcgccgcccacaccactgcttgcggtgccagcaacgccgccactcgtactgccagcagtcagcgacaccttgccacccgctccggtgttgccaccacccacggacagctcgatgttgcctcccctgccgccagtcgccgcacccgtcgacacacgaaccgacccgctcgacgacgacgaggacgcgccgctcgccacagacaaagccccgctcgcgccggacgtagcactccacagcgacacgtcaccgctcggagagctcgtccctgccgaagcaccgctgatcacgctgatggatccgcctgtcagcgcgccttggccgccgaacagctcgaccgagccgccgctggagcctgtcgtactggccgagctcaggccggccgtgagcgacaccttgccgccgttaccgaccgagccgtcgcccacgctcaccaccacagacccgccgctgccgcccgtgctcgcgccgctgctcagcaagaggctgcccgaagnnnnnnnnnnnnnnnnnnnnnnnnnnnnnnnnnnnnnnnnnnnnnnnnnnnnnnnnnnnnnnnnnnnnnnnnnnnnnnnnnnnnnnnnnnnnnnnnnnnnnnnnnnnnnnnnnnnnnnnnnnnnnnnnnnnnnnnnnnnnnnnnnnnnnnnnnnnnnnnnnnnnnnnnnnnnnnnnnnnnnnnnnnnnnnnnnnnnnnnnnnnnnnnnnnnnnnnnnnnnnnnnnnnnnnnnnnnnnnnnnnnnnnnnnnnnnnnnnnnnnnnnnnnnnnnnnnnnnnnnnnnnnnnnnnnnnnnnnnnnnnnnnnnnnnnnnnnnnnnnnnnnnnnnnnnnnnnnnnnnnnnnnnnnnnnnnnnnnnnnnnnnnnnnnnnnnnnnnnnnnnnnnnnnnnnnnnnnnnnnnnnnnnnnnnnnnnnnnnnnnnnnnnnnnnnnnnnnnnnnnnnnnnnnnnnnnnnnnnnnnnnnnnnnnnnnnnnnnnnnnnnnnnnnnnnnnnnnnnnnnnnnnnnnnnnnnnnnnnnnnnnnnnnnnnnnnnnnnnnnnnnnnnnnnnnnnngctcgcgccgctgctcagcaagaggctgcccgaagacccggcagccgcgttcccgctactgaagctcagcacgccagaacgaccggcagtgccgcccgtcgccgtgcccagcgaaatggacccgctcgtgctgcccacgctgcggccgctcaagacactcaccgagccgcccgtgccgctcgtcgaagacgacaccgccgtcgagtcgcctgcccacagcgagatggcgccaccggacaacgcgtctccagcgcccaccgacagcgagatcgacccgccgtggccgcccgtcgacacgcccgtgctcacgctcaccgatccgctgtcgccctcgcgactagtaccgctcgatagacgcagactgccgctcacgccactgctgctcgccgagctcggagtcgtcagcgagatgtcgccgctggacgtcgtcaggcccgcgccgctctgcagcgagatcgacccgccactcgccacgccgctgccgccgctcaacgaaatcgagccgcccactgtgcccgtggtggtatgcgtgttgcccgaccgcagcgagatagacccgccagcaccactgctgcccgtgcccacactgagcagcacggacccgccgttgccgccggtgctgccgccagtgctcaccgtcacgtcgcccaccgtgcccgccgtcgcagagcccgtctccaggcgcaccaacccagacggaccgctcgagctgccgtccggtgtgcgcaccagcacgctgccactcgtgaagctgctgctcgcgccgctagatatctccacagcgccgcccacaccactgctcgcggtgccagcaacgccgccactcgtactgccagcagtcagcgacaccttgccacccgctccggtgttgccaccacccacggacagctcgatgttgcctcccctgccgccagtcgccgcacccgtcgacacacgaaccgacccgctcgacgacgacgaggacgcgccgctcgccacagacaaagccccgctcgcgccggacgtagcactccacagcgacacgccaccgcttggagagctcgtccctgccgaagcaccgctgatcacgctgatggatccgcctgtcagcgcgccttggccgccgaacagctcgaccgagccgccgctggagcctgtcgtactggccgagctcaggccggccgtgagcgacaccttgccgccgttgccgaccgagccgtcgcccacgctcaccaccacagacccgccgctgccgcccgtgctcgcgccgctgctcagcaagaggctgcccgaagacccggcagccgcgttcccgctactgaagctcagcacgccagaacgaccggcagtgccgcccgtcgccgtgcccagcgaaatggacccgctcgtgctgcccacgctgcggccgctcaagacactcaccgagccgcccgtgccgctcgtcgaagacgacaccgccgtcgagtcgcctgcccacagcgagatggcaccaccggacaacgcgtctccagcgcccaccgacagcgagatcgacccgccgtggccgcccgtcgacacgcccgtgctcacgctcaccgatccgctgtcgccctcgcgactagtaccgctcgatagacgcagactgccgctcacgccgctgctgctcgccgagctcggagtcgtcagcgagatgtcgccgctggacgtcgtcaggcccgcgccgctctgcagcgagatcgacccgccactcgccacgccgctgccgccgctcaacgaaatcgagccgcccactgtgcccgtggtggtatgcgtgttgcccgaccgcagcgagatagacccgccagcaccactgctgcccgtgcccacactgagcagcacggacccgccgttgccgccggtgctgccgccagtgctcaccgtcacgtcgcccaccgtgcccgccgtcgcagagcccgtctccaggcgcaccaacccagacggaccgctcgagctgccgtccggtgtgcgcaccagcacgctgccactcgtgaagctgctgctcgcgccgctagatatctccacagcgccacccacaccactgctcgcggtgccagcaacgccgccactcgtactgccagcagtcagcgacaccttgccacccgctccggtgttgccaccacccacggacagctcgatgttgcctcccctgccgccagtcgccgcacccgtcgacacacgaaccgacccgctcgacgacgacgaggacgcgccgctcgccacagacaaagccccgctcgcgccggacgtagcactccacagcgacacgtcaccgctcggagagctcgtccctgccgaagcaccgctgatcacgctgatggatccgcctgtcagcgcgccttggccgccgaacagctcgaccgagccgccgctggagcctgtcgtactggccgagctcaggccggccgtgagcgacaccttgccgccgttgccgaccgagccgtcgcccacgctcaccaccacagacccgccgctgccgcccgtgctcgcgccgctgctcagcaagaggctgcccgaagacccggcagccgcgttcccgctactgaagctcagcacgccagaacgaccggcagtgccgcccgtcgccgtgcccagcgaaatggacccgctcgtgctgcccacgctgcggccgctcaagacactcaccgagccgcccgtgccgctcgtcgaagacgacaccgccgtcgagtcgcctgcccacagcgagatggcgccaccggacaacgcgtctccagcgcccaccgacagcgagatcgacccgccgtggccgcccgtcgacacgcccgtgctcacgctcaccgatccgctgtcgccctcgcgactagtaccgctcgatagacgcagactgccgctcacgccactgctgctcgccgagctcggagtcgtcagcgagatgtcgccgctggacgtcgtcaggcccgcgccgctctgcagcgagatcgacccgccactcgccacgccgctgccgccgctcaacgaaatcgagccgcccactgtgcccgtggtggtatgcgtgttgcccgaccgcagcgagatagacccgccagcaccactgctgcccgtgcccacactgagcagcacggacccgccgttgccgccggtgctgccgccagtgctcaccgtcacgtcgcccaccgtgcccgccgtcgcagagcccgtctccaggcgcaccaacccagacggaccgctcgagctgccgtccggtgtgcgcaccagcacgctgccactcgtgaagctgctgctcgcgccgctagatatctccacagcgccgcccacaccactgctcgcggtgccagcaacgccgccactcgtactgccagcagtcagcgacaccttgccacccgctccggtgttgccaccacccacggacagctcgatgttgcctcccctgccgccagtcgccgcacccgtcgacacacgaaccgacccgctcgacgacgacgaggacgcgccgctcgccacagacaaagccccgcttgcgccggacgtagcactccacaacgacacgtcaccgctcggagagctcgtccctgccgaagcaccgctgatcacgctgatggatccgcccgtcagcgcgccttggccgccgaacagctcgaccgagccgccgctggagcctgtcgtactggccgagctcaggccggccgtgagcgacaccttgccgccgttgccgaccgagccgtcgcccacgctcaccaccacagacccgccactgccgcccgtgctcgcgccgctgctcagcaagaggctgcccgaagacccggcagccgcgttcccgctactgaagctcagcacgccagaacgaccggcagtgccgcccgtcgccgtgcccagcgaaatggacccgctcgtgctgcccacgctgcggccgctcaagacactcaccgagccgcccgtgccgctcgtcgaagacgacaccgccgtcgagtcgcctgcccacagcgagatggcgccaccggacaacgcgtctccagcgcccaccgacagcgagatcgacccgccgtggccgcccgtcgacacgcccgtgctcacgctcaccgatccgctgtcgccctcgcgactagtaccgctcgatagacgcagactgccgctcacgccgctgctgctcgccgagctcggagtcgtcagcgagatgtcgccgctggacgtcgtcaggcccgcgccgctctgcagcgagatcgacccgccactcgccacgccgctgccgccgctcaacgaaatcgagccgcccactgtgcccgtggtggtatgcgtgttgcccgaccgcagcgagatagacccgccagcaccactgctgcccgtgcccacactgagcagcacggacccgccgttgccgccggtgctgccgccagtgctcaccgtcacgtcgcccaccgtgcccgccgtcgcagagcccgtctccaggcgcaccaacccagacggaccgctcgagctgccgtccggtgtgcgcaccagcacgctgccactcgtgaagctgctgctcgcgccgctagatatctccacagcgccgcccacaccactgctcgcggtgccagcaacgccgccactcgtactgccagcagtcagcgacaccttgccacccgctccggtgttgccaccacccacagacagctcgatgttgcctcccctgccgccagtcgccgcacccgtcgacacacgaaccgacccgctcgacgacgacgaggacgcgccgctcgccacagacaaagccccactcgtcgacgacgaggacgcgccgctcgccacagacaaagccccgctcgcgccggacgtagcactccacagcgacacgtcaccgctcggagagctcgtccctgccgaagcaccgctgatcacgctgatggatccgcctgtcagcgcgccttggccgccgaacagctcgaccgagccgccgctggagcctgtcgtactggccgagctcaggccggccgtgagcgacaccttgccgccgttgccgaccgagccgtcgcccacgctcaccactacagacccgccgctgccgcccgtgctcgcgccgctgctcagcaagaggctgcccgaagacccggcagccgcgttcccgctactgaagctcagcacgccagaacgaccggcagtgccgcccgtcgccgtgcccagcgaaatggacccgctcgtgctgcccacgctgcggccgctcaagacactcaccgagccgcccgtgccgctcgtcgaagacgacaccgccgtcgagtcgcctgcccacagcgagatggcgccaccggacaacgcgtctccagcgcccaccgacagcgagatcgacccgccgtggccgcccgtcgacacgcccgtgctcacgctcaccgatccgctgtcgccctcgcgactagtaccgctcgatagacgcagactgccgctcacgccgctgctgctcgccgagctcggagtcgtcagcgagatgtcgccgctggacgtcgtcaggcccgcgccgctctgcagcgagatcgacccgccactcgccacgccgctgccgccgctcaacgaaatcgagccgcccactgtgcccgtggtggtatgcgtgttgcccgaccgcagcgagatagacccgccagcaccactgctgcccgtgcccacactgagcagcacggacccgccgttgccgccggtgctgccgccagtgctcaccgtcacgtcgcccaccgtgcccgccgtcgcagagcccgtctccaggcgcaccaacccagacggaccgctcgagctgccgtccggtgtgcgcaccagcacgctgccactcgtgaagctgctgctcgcgccgctagatatctccacagcgccgcccacaccactgctcgcggtgccagcaacgccgccactcgtactgccagcagtcagcgacaccttgccacccgctccggtgttgccaccacccacggacagctcgatgttgcctcccctgccgccagtcgccgcacccgtcgacacacgaaccgacccgctcgacgacgacgaggacgcgccgctcgccacagacaaagccccgctcgcgccggacgtagcactccacagcgacacgtcaccgctcggagagctcgtccctgccgaagcaccgctgatcacgctgatggatccgcccgtcagcgcgccttggccgccgaacagctcgaccgagccgccgctggagcctgtcgtactggccgagctcaggccggccgtgagcgacaccttgccaccgttgccgaccgagccgtcgcccacgctcaccaccacagacccgccgctgccgcccgtgctcgcgccgctgctcagcaagaggctgcccgaagacccggcagccgcgttcccgctactgaagctcagcacgccagaacgaccggcagtgccgcccgtcgccgtgcccagcgaaatggacccgctcgtgctgcccacgctgcggccgctcaagacactcaccgagccgcccgtgccgctcgtcgaagacgacaccgccgtcgagtcgcctgcccacagcgagatggcgccaccggacaacgcgtctccagcgcccaccgacagcgagatcgacccgccgtggccgcccgtcgacacgcccgtgctcacgctcaccgatccgctgtcgccctcgcgactagtaccgctcgatagacgcagacttccgctcacgccgctgctgctcgccgagctcggagtcgtcagcgagatgtcgccgctggacgtcgtcaggcccgcgccgctctgcagcgagatcgacccgccactcgccacgccgctgccgccgctcaacgaaatcgagccgcccactgtgcccgtggtggtatgcgtgttgcccgaccgcagcgagatagacccgccagcaccactgctgcccgtgcccacactgagcagcacggacccgccgttgccgccggtgctgccgccagtgctcaccgtcacgtcgcccaccgtgcccgccgtcgcagagcccgtctccaggcgcaccaacccagacggaccgctcgagctgccgtccggtgtgcgcaccagcacgctgccactcgtgaagctgctgctcgcgccgctagatatctccacagcgccgcccacaccactgctcgcggtgccagcaacgccgccactcgtactgccagcagtcagcgacaccttgccacccgctccggtgttgccaccacccacggacagctcgatgttgcctcccctgccgccagtcgccgcacccgtcgacacacgaaccgacccgctcgacgacgacgaggacgcgccgctcgccacagacaaagccccgctcgcgccggacgtagcactccacagcgacacgtcaccgctcggagagctcgtccctgccgaagcaccgctgatcacgctgatggatccgcctgtcagcgcgccttggccgccgaacagctcgaccgagccgccgctggagcctgtcgtactggccgagctcaggccggccgtgagcgacaccttgccgccgttgccgaccgagccgtcgcccacgctcaccactacagacccgccgctgccgcccgtgctcgcgccgctgctcagcaagaggctgcccgaagacccggcagccgcgttcccgctactgaagctcagcacgccagaacgaccggcagtgccgcccgtcgccgtgcccagcgaaatggacccgctcgtgctgcccacgctgcggccgctcaagacactcaccgagccgcccgtgccgctcgtcgaagacgacaccgccgtcgagtcgcctgcccacagcgagatggcgccaccggacaacgcgtctccagcgcccaccgacagcgagatcgacccgccgtggccgcccgtcgacacgcccgtgctcacgctcaccgatccgctgtcgccctcgcgactagtaccgctcgatagacgcagactgccgctcacgccgctgctgctcgccgagctcggagtcgtcagcgagatgtcgccgctggacgtcgtcaggcccgcgccgctctgcagcgagatcgacccgccactcgccacgccgctgccgccgctcaacgaaatcgagccgcccactgtgcccgtggtggtatgcgtgttgcccgaccgcagcgagatagacccgccagcaccactgctgcccgtgcccacactgagcagcacggacgcgccgttgccgccggtgctgccgccagtgctcaccgtcacgtcgcccaccgtgcccgccggcgcagagcccgtctccaggcgcaccaacccagacggaccgctcgagctgccgtccggtgtgcgcaccagcacgctgccactcgtgaagctgctgctcgcgccgctagatatctccacagcgccgcccacaccactgctcgcggtgccagcaacgccgccactcgtactgccagcagtcagcgacaccttgccacccgctccggtgttgccaccacccacggacagctcgatgttgcctcccctgccgccagtcgccgcacccgtcgacacacgaaccgacccgctcgacgacgacgaggacgcgccgctcgccacagacaaagccccgctcgcgccggacgtagcactccacagcgacacgtcaccgctcggagagctcgtccctgccgaagcaccgctgatcacgctgatggatccgcccgtcagcgcgccttggccgccgaacagctcgaccgagccgccgctggagcctgtcgtactggccgagctcaggccggccgtgagcgacaccttgccgccgttaccgaccgagccgtcgcccacgctcaccaccacagacccgccgctgccgcccgtgctcgcgccgctgctcagcaagaggctgcccgaagacccggcagccgcgttcccgctactgaagctcagcacgccagaacgaccggcagtgccgcccgtcgccgtgcccagcgaaatggacccgctcgtgctgcccacgctgcggccgctcaagacactcaccgagccgcccgtgccgctcgtcgaagacgacaccgccgtcgagtcgcctgcccacagcgagatggcgccaccggacaacgcgtctccagcgcccaccgacagcgagatcgacccgccgtggccgcccgtcgacacgcccgtgctcacgctcaccgatccgctgtcgccctcgcgactagtaccgctcgatagacgcagactgccgctcacgccgctgctgctcgccgagctcggagtcgtcagcgagatgtcgccgctggacgtcgtcaggcccgcgccgctctgcagcgagatcgacccgccactcgccacgccgctgccgccgctcaacgaaatcgagccgcccactgtgcccgtggtggtatgcgtgttgcccgaccgcagcgagatagacccgccagcaccactgctgcccgtgcccacactgagcagcacggacccgccgttgccgccggtgctgccgccagtgctcaccgtcacgtcgcccaccgtgcccgccgtcgcagagcccgtctccaggcgcaccaacccagacggaccgctcgagctgccgtccggtgtgcgcaccagcacgctgccactcgtgaagctgctgctcgcgccgctagatatctccacagcgccgcccacaccactgctcgcggtgccagcaacgccgccactcgtactgccagcagtcagcgacaccttgccacccgctccggtgttgccaccacccacagacagctcgatgttgcctcccctgccgccagtcgccgcacccgtcgacacacgaaccgacccgctcgacgacgacgaggacgcgccgctcgccacagacaaagccccactcgtcgacgacgaggacgcgccgctcgccacagacaaagccccgctcgcgccggacgtagcactccacagcgacacgtcaccgctcggagagctcgtccctgccgaagcaccgctgatcacgctgatggatccgcctgtcagcgcgccttggccgccgaacagctcgaccgagccgccgctggagcctgtcgtactggccgagctcaggccggccgtgagcgacaccttgccgccgttgccgaccgagccgtcgcccacgctcaccactacagacccgccgctgccgcccgtgctcgcgccgctgctcagcaagaggctgcccgaagacccggcagccgcgttcccgctactgaagctcagcacgccagaacgaccggcagtgccgcccgtcgccgtgcccagcgaaatggacccgctcgtgctgcccacgctgcggccgctcaagacactcaccgagccgcccgtgccgctcgtcgaagacgacaccgccgtcgagtcgcctgcccacagcgagatggcgccaccggacaacgcgtctccagcgcccaccgacagcgagatcgacccgccgtggccgcccgtcgacacgcccgtgctcacgctcaccgatccgctgtcgccctcgcgactagtaccgctcgatagacgcagactgccgctcacgccgctgctgctcgccgagctcggagtcgtcagcgagatgtcgccgctggacgtcgtcaggcccgcgccgctctgcagcgagatcgacccgccactcgccacgccgctgccgccgctcaacgaaatcgagccgcccactgtgcccgtggtggtatgcgtgttgcccgaccgcagcgagatagacccgccagcaccactgctgcccgtgcccacactgagcagcacggacccgccgttgccgccggtgctgccgccagtgctcaccgtcacgtcgcccaccgtgcccgccgtcgcagagcccgtctccaggcgcaccaacccagacggaccgctcgagctgccgtccggtgtgcgcaccagcacgctgccactcgtgaagctgctgctcgcgccgctagatatctccacagcgccgcccacaccactgctcgcggtgccagcaacgccgccactcgtactgccagcagtcagcgacaccttgccacccgctccggtgttgccaccacccacggacagctcgatgttgcctcccctgccgccagtcgccgcacccgtcgacacacgaaccgacccgctcgacgacgacgaggacgcgccgctcgccacagacaaagccccgctcgcgccggacgtagcactccacagcgacacgtcaccgctcggagagctcgtccctgccgaagcaccgctgatcacgctgatggatccgcctgtcagcgcgccttggccgccgaacagctcgaccgagccgccgctggagcctgtcgtactggccgagctcaggccggccgtgagcgacaccttgccgccgttgccgaccgagccgtcgcccacgctcaccaccacagacccgccgctgccgcccgtgctcgcgccgctgctcagcaagaggctgcccgaagacccggcagccgcgttcccgctactgaagctcagcacgccagaacgaccggcagtgccgcccgtcgccgtgcccagcgaaatggacccgctcgtgctgcccacgctgcggccgctcaagacactcaccgagccgcccgtgccgctcgtcgaagacgacaccgccgtcgagtcgcctgcccacagcgagatggcgccaccggacaacgcgtctccagcgcccaccgacagcgagatcgacccgccgtggccgcccgtcgacacgcccgtgctcacgctcaccgatccgctgtcgccctcgcgactagtaccgctcgatagacgcagactgccgctcacgccgctgctgctcgccgagctcggagtcgtcagcgagatgtcgccgctggacgtcgtcaggcccgcgccgctctgcagcgagatcgacccgccactcgccacgccgctgccgccgctcaacgaaatcgagccgccnnnnnnnnnnnnnnnnnnnnnnnnnnnnnnnnnnnnnnnnnnnnnnnnnnnnnnnnnnnnnnnnnnnnnnnnnnnnnnnnnnnnnnnnnnnnnnnnnnnnnnnnnnnnnnnnnnnnnnnnnnnnnnnnnnnnnnnnnnnnnnnnnnnnnnnnnnnnnnnnnnnnnnnnnnnnnnnnnnnnnnnnnnnnnnnnnnnnnnnnnnnnnnnnnnnnnnnnnnnnnnnnnnnnnnnnnnnnnnnnnnnnnnnnnnnnnnnnnnnnnnnnnnnnnnnnnnnnnnnnnnnnnnnnnnnnnnnnnnnnnnnnnnnnnnnnnnnnnnnnnnnnnnnnnnnnnnnnnnnnnnnnnnnnnnnnnnnnnnnnnnnnnnnnnnnnnnnnnnnnnnnnnnnnnnnnnnnnnnnnnnnnnnnnnnnnnnnnnnnnnnnnnnnnnnnnnnnnnnnnnnnnnnnnnnnnnnnnnnnnnnnnnnnnnnnnnnnnnnnnnnnnnnnnnnnnnnnnnnnnnnnnnnnnnnnnnnnnnnnnnnnnnnnnnnnnnnnnnnnnnnnnnnnnnnnnnnnnnnnnnnnnnnnnnnnnnnnnnnnnnnnnnnnnnnnnnnnnnnnnnnnnnnnnnnnnnnnnnnnnnnnnnnnnnnnnnnnnnnnnnnnnnnnnnnnnnnnnnnnnnnnnnnnnnnnnnnnnnnnnnnnnnnnnnnnnnnnnnnnnnnnnnnnnnnnnnnnnnnnnnnnnnnnnnnnnnnnnnnnnnnnnnnnnnnnnnnnnnnnnnnnnnnnnnnnnnnnnnnnnnnnnnnnnnnnnnnnnnnnnnnnnnnnnnnnnnnnnnnnnnnnnnnnnnnnnnnnnnnnnnnnnnnnnnnnnnnnnnnnnnnnnnnnnnnnnnnnnnnnnnnnnnnnnnnnnnnnnnnnnnnnnnnnnnnnnnnnnnnnnnnnnnnnnnnnnnnnnnnnnnnnnnnnnnnnnnnnnnnnnnnnnnnnnnnnnnnnnnnnnnnnnnnnnnnnnnnnnnnnnnnnnnnnnnnnnnnnnnnnnnnnnnnnnnnnnnnnnnnnnnnnnnnnnnnnnnnnnnnnnnnnnnnnnnnnnnnnnnaccggccgtgcctgttggggtattttgcgcacccgttccgaggtgcgtgtcgcccgaccgcagcgagatggctccgccagtaccactgctgcccgtgcccacactgaggagtatggacccgccgtttccacaggtgctgccgccagtgctgattgctatatttccgactgttcctgctgtcgcggctcctgtcgttagagtgatgaatccagatttgccaatggcccctgcgtccggtgttgcaatggcagcgcccccgctggaaccgtagttggtagatcctgtcatcataagtattggccctcctgcagcgtgttgatctagagtcgcaccagcttttagtataatactggcgccatctcctgtatctccagtaccagcgagtagctggatggatcctccgcttccttgggttgcatcgccagtctggatatttgcatcgccgctgttgccaccaagactttttccagtcgcaacaaatactccaccagaacgaccggcagctcctgaaacctcggtagctacgacaacattcccagaactggaaattgtgcttccaccagatttgagcgaaacttgaccaccagtctgagaaccaaggccgccagttgcagcaaaggaaccaccaacgtcagagctatttcctgctgatacaagcaagtctcccccacgcacagggccagcacttccaaccgacagctcgatgtttccacctctcttcatctgagaactgccagtagttacggaaagtttaccagagtcagcagtacttgaatatcctgtagtgatattcactgctccagactgccccatgattccagcagctggagtctcgatttggaccgagccactagacgtcaacgttcccgccccggcgcgcaagaaaatcgaccctccagttccactgtaactgtttccgctggtagcattgatcattcctccagctccacgtgtcccagctccgacaaccatagaaatcgatcccccagcttgcccagcggaagtacccgtgaccagacttattgatccacttactccggtagctgctgcgcctgtatatacagcaatagagcctgaaccacctgtgtcgctggaatcgggagagttcaacgtaaggtcaccgctactctggggaccaacacctgatgcaatgctggctgtcccgccaatggcctgggagctatctccagccacaacactagcgtcaccacctcggagtcgatttggacctgcctgtagagtagcgtttccaccataagcggcattgctggtaccaacggcaactacaacgttgccagcttgcgagctggtcgatgatccagtagaaatacttaggtttccgctggtcaaatctgcagccccagtactgaagttcatagcaccagaggcactcactttgccagtagaaaacgtcgagatattgacatcgcctgttgtacctcgatcagcgtatcctgaacgaataacaactgatccaccattactcgtgccgtttccactcagaacactaaccgagccacccgcacgagtttttgaaataccgacgctaatcattatacttccgctttgaccactagaggaacttccagataaaacattcacgtcgcccgaagttcctgtgccggccaaaccactcgaaattgtcacggttccagttgttgcggtagatttccccgattgaatcgccacagaccctgacgtggctgttcctgagcctgatgacacatacactgctccacccgtagacccattgccagctgaaacaaccacaggcgatcctgataatcgcccagacgacccaccaaaaacaccaacacctccagggcttcctgtggagctcccacctgattttaacaccagatcacctgtaacgccatcgccagagtcaccagttcctatcgttgcagagcccgtcgagccgctgataatacctccactaacaaacgacacatttccagacatacctgtagccgttgcagcactagcaatatccacattgccactagagctgcttttagcgtcagtaccaccagaggtaaagttcaagtcgccgccaacaccacttcggctacttccccccgcaacgaatatgtttccaccgtccttggagcttcggccagtttgaagcccgatgtcaccactacttccatccgttgatgatcctgtactgagcattaccccgccgctgtttagagtcgaggtgcccgtcgtagatttaatcgcaccagaagctcgagctgactgcgtctgctgctccactccacctgagacttggctcatactccatccaccgctaatgaccacaccacctccatcggcattggagctgccgcccgcggaaacattcacatttcccccaacttgggagccgctccatccagccgcaatggtcaaattgctgccagtgataccacccctacccccagacacgctcacattcccagctgttgcactcgagtcgccagtcgctaccgtcaccggacccgatgctgctgcggccgtcatgccggacgcaagcgtcaccggaccagaactcacgctgccggcgctagcgccagacacaatgccgacgctcccgctggatagaccatcgctcgccccggactgcagatacatggatccgccacgaccaacgcttgaccgcccgcctgaaacaatgacgtcgccaaccacgtcgcgcgcggcaccggacgataaggacacgatgccgctcgatccctggctgcctccgccagacgcaacatcgacacgaccgctgtagccacctgcgctggagttgcgagaagagatcgcaactgtgccagacgttgcgcctcctccagacagaatgtcgacacgccctcctacacttgagctgctgttcccggagaatagctgcacagacccgccagtcacgccagtaccagcgcccgcagacagccgtacaccacctgtcgagacactgctgtctcccgaaacgatgttcacaccaccagagaccgatgaagctgatgaccctgtaccaatagtgatcgcgccgcttggacccgtactggtggaggccgaccggagagaaactgcagcagatacgtcgctcgcagcacctccggagacgccagaggaaatgtcgaccgcaccaagtgatccgcgcccagaggcgatgctcaccggaccagcgctgcgcatagcatccgaaacactcgtcgacactgtgatcgcaccaccggtgccgccggatcccgatgccccagcaagcacattgaccgaaccgcccttcgacgaaccagtgccaccactcacaccgatgtcccctccagtgctggaagatccacctgtcatggcgacagcaccgccgacaccgctagcggagttcgatgcgccgcctgccacacgcacggacccgactgaggcggaagacgcggaagcaccactgctgatgagcacatcgcccgacagaccgctcgaggagctacccgattcgatctggacggctccactgctcgcagatgatgacaccgcagcagagcgcaagcccactttgcctgagtcgcccacaacggacgtgcccgacacgatgctcacgctcccaccagcggccttcgagctgtcgcccgcgccaacaagcacactgccgccacttccagtcgatgaaaaacctcccgaaatggacgtcagtcctacactcgtatccgcatcgccagttgtcagcgtcacgttcccgcttccgcgcgccttggagcccgagctagacgcggaagagatcgaaacttcgccagtggcaccgccagccgaagcgcccgactggacgctcactgacccaccggcgccactggaaccggacgcaccggccgacaacgtcactcgtccaccacttccagctgagctggaaccagcgccgatcgccacgctgccactgttgccactcaccgagtcaccagagcgcaactcgactagaccactagacccagcgccaacgccgcggcccgaagctaaactcacgtttccagctgttgcactcgagtcgccagtcgctaccgtcaccggacccgatgctgctgcggccgtcatgccggacgcaagcgtcaccggaccagaactcacgctgccggcgctagcgccagacacaatgccgacgctcccgctggatagaccatcgctcgccccggactgcagatacatggatccgccacgaccaacgcttgaccgcccgcctgaaacaatgacgtcgccaaccacgtcgcgcgcggcaccggacgataaggacacgatgccgctcgatccctggctgcctccgccagacgcaacatcgacacgaccgctgtagccacctgcgctggagttgcgagaagagatcgcaattgtgccagacgttgcgcctcctccagacagaatgtcgacacgccctcctacacttgagctgctgttcccggagaatagctgcacagacccgccagtcacgccagtaccagcgcccgcagacagccgtacaccacccgtcgagacactgctgtctcccgaaacgatgttcacaccaccagagaccgatgaagctgatgaccctgtaccaatagtgatcgcgccgcttggacccgtactggtggaggccgaccggagagaaactgcagcagatacgtcgctcgcagcacctccggagacgccagaggaaatgtcgaccgcaccaagtgatccgcgcccagaggcgatgctcaccggaccagcgctgcgcatagcatccgaaacactcgtcgacactgtgatcgcaccaccggtgccgccggatcccgatgccccagcaagcacattgaccgaaccgcccttcgacgaaccagtgccaccactcacaccgatgtcccctccagtgctggaagatccacctgtcatggcgacagcaccgccgacaccgctagcggagttcgatgcgccgcctgccacacgcacggacccgactgaggcggaagacgcggaagcaccactgctgatgagcacatcgcccgacagaccgctcgaggagctacccgattcgatctggacggctccactgctcgcagatgatgacaccgcagcagagcgcaagcccactttgcctgagtcgcccacaacggacgtgcccgacacgatgctcacgctcccaccagcggccttcgagctgtcgcccgcgccaacaagcacactgccgccacttccagtcgatgaaaaacctcccgaaatggacgtcagtcctacactcgtatccgcatcaccagttctcagcgtcacgttcccgcttccgcgcgccttggagcccgagctagacgcggaagagatcgaaacttcgccagtggcaccgccagccgaagcgcccgactggacgctcactgacccaccggcgccactggaaccggacgcaccggccgacaacgtcactcgtccaccacttccagctgagctggaaccagcgccgatcgccacgctgccactgttgccactcaccgagtcaccagagcgcaactcgactagaccactagacccagcgccaacgccgcggcccgaagctaaactcacgtttccagctgttgcactcgagtcgccagtcgctaccgtcaccggacccgatgctgctgcggccgtcatgccggacgcaagcgtcaccggaccagaactcacgctgccggcgctagcgccagacacannnnnnnnnnnnnnnnnnnnnnnnnnnnnnnnnnnnnnnnnnnnnnnnnnnnnnnnnnnnnnnnnnnnnnnnnnnnnnnnnnnnnnnnnnnnnnnnnnnnnnnnnnnnnnnnnnnnnnnnnnnnnnnnnnnnnnnnnnnnnnnnnnnnnnnnnnnnnnnnnnnnnnnnnnnnnnnnnnnnnnnnnnnnnnnnnnnnnnnnnnnnnnnnnnnnnnnnnnnnnnnnnnnnnnnnnnnnnnnnnnnnnnnnnnnnnnnnnnnnnnnnnnnnnnnnnnnnnnnnnnnnnnnnnnnnnnnnnnnnnnnnnnnnnnnnnnnnnnnnnnnnnnnnnnnnnnnnnnnnnnnnnnnnnnnnnnnnnnnnnnnnnnnnnnnnnnnnnnnnnnnnnnnnnnnnnnnnnnnnnnnnnnnnnnnnnnnnnnnnnnnnnnnnnnnnnnnnnnnnnnnnnnnnnnnnnnnnnnnnnnnnnnnnnnnnnnnnnnnnnnnnnnnnnnnnnnnnnnnnnnnnnnnnnnnnnnnnnnnnnnnnnnnnnnnnnnnnnnnnnnnnnnnnnnnnnnnnnnnnnnnnnnnnnnnnnnnnnnnnnnnnnnnnnnnnnnnnnnnnnnnnnnnnnnnnnnnnnnnnnnnnnnnnnnnnnnnnnnnnnnnnnnnnnnnnnnnnnnnnnnnnnnnnnnnnnnnnnnnnnnnnnnnnnnnnnnnnnnnnnnnnnnnnnnnnnnnnnnnnnnnnnnnnnnnnnnnnnnnnnnnnnnnnnnnnnnnnnnnnnnnnnnnnnnnnnnnnnnnnnnnnnnnnnnnnnnnnnnnnnnnnnnnnnnnnnnnnnnnnnnnnnnnnnnnnnnnnnnnnnnnnnnnnnnnnnnnnnnnnnnnnnnnnnnnnnnnnnnnnnnnnnnnnnnnnnnnnnnnnnnnnnnnnnnnnnnnnnnnnnnnnnnnnnnnnnnnnnnnnnnnnnnnnnnnnnnnnnnnnnnnnnnnnnnnnnnnnnnnnnnnnnnnnnnnnnnnnnnnnnnnnnnnnnnnnnnnnnnnnnnnnnnnnnnnnnnnnnnnnnnnnnnnnnnnnnnnnnnnnnnnnnnnnnnnnnnnnnnnnnnnnnnnnnnnnnnnnnnnnnnnnnnnnnnnnnnnnnnnnnnnnnnnnnnnnnnnnnnnnnnnnnnnnnnnnnnnnnnnnnnnnnnnnnnnnnnnnnnnnnnnnnnnnnnnnnnnnnnnnnnnnnnnnnnnnnnnnnnnnnnnnnnnnnnnnnnnnnnnnnnnnnnnnnnnnnnnnnnnnnnnnnnnnnnnnnnnnnnnnnnnnnnnnnnnnnnnnnnnnnnnnnnnnnnnnnnnnnnnnnnnnnnnnnnnnnnnnnnnnnnnnnnnnnnnnnnnnnnnnnnnnnnnnnnnnnnnnnnnnnnnnnnnnnnnnnnnnnnnnnnnnnnnnnnnnnnnnnnnnnnnnnnnnnnnnnnnnnnnnnnnnnnnnnnnnnnnnnnnnnnnnnnnnnnnnnnnnnnnnnnnnnnnnnnnnnnnnnnnnnnnnnnnnnnnnnnnnnnnnnnnnnnnnnnnnnnnnnnnnnnnnnnnnnnnnnnnnnnnnnnnnnnnnnnnnnnnnnnnnnnnnnnnnnnnnnnnnnnnnnnnnnnnnnnnnnnnnnnnnnnnnnnnnnnnnnnnnnnnnnnnnnnnnnnnnnnnnnnnnnnnnnnnnnnnnnnnnnnnnnnnnnnnnnnnnnnnnnnnnnnnnnnnnnnnnnnnnnnnnnnnnnnnnnnnnnnnnnnnnnnnnnnnnnnnnnnnnnnnnnnnnnnnnnnnnnnnnnnnnnnnnnnnnnnnnnnnnnnnnnnnnnnnnnnnnnnnnnnnnnnnnnnnnnnnnnnnnnnnnnnnnnnnnnnnnnnnnnnnnnnnnnnnnnnnnnnnnnnnnnnnnnnnnnnnnnnnnnnnnnnnnnnnnnnnnnnnnnnnnnnnnnnnnnnnnnnnnnnnnnnnnnnnnnnnnnnnnnnnnnnnnnnnnnnnnnnnnnnnnnnnnnnnnnnnnnnnnnnnnnnnnnnnnnnnnnnnnnnnnnnnnnnnnnnnnnnnnnnnnnnnnnnnnnnnnnnnnnnnnnnnnnnnnnnnnnnnnnnnnnnnnnnnnnnnnnnnnnnnnnnnnnnnnnnnnnnnnnnnnnnnnnnnnnnnnnnnnnnnnnnnnnnnnnnnnnnnnnnnnnnnnnnnnnnnnnnnnnnnnnnnnnnnnnnnnnnnnnnnnnnnnnnnnnnnnnnnnnnnnnnnnnnnnnnnnnnnnnnnnnnnnnnnnnnnnnnnnnnnnnnnnnnnnnnnnnnnnnnnnnnnnnnnnnnnnnnnnnnnnnnnnnnnnnnnnnnnnnnnnnnnnnnnnnnnnnnnnnnnnnnnnnnnnnnnnnnnnnnnnnnnnnnnnnnnnnnnnnnnnnnnnnnnnnnnnnnnnnnnnnnnnnnnnnnnnnnnnnnnnnnnnnnnnnnnnnnnnnnnnnnnnnnnnnnnnnnnnnnnnnnnnnnnnnnnnnnnnnnnnnnnnnnnnnnnnnnnnnnnnnnnnnnnnnnnnnnnnnnnnnnnnnnnnnnnnnnnnnnnnnnnnnnnnnnnnnnnnnnnnnnnnnnnnnnnnnnnnnnnnnnnnnnnnnnnnnnnnnnnnnnnnnnnnnnnnnnnnnnnnnnnnnnnnnnnnnnnnnnnnnnnnnnnnnnnnnnnnnnnnnnnnnnnnnnnnnnnnnnnnnnnnnnnnnnnnnnnnnnnnnnnnnnnnnnnnnnnnnnnnnnnnnnnnnnnnnnnnnnnnnnnnnnnnnnnnnnnnnnnnnnnnnnnnnnnnnnnnnnnnnnnnnnnnnnnnnnnnnnnnnnnnnnnnnnnnnnnnnnnnnnnnnnnnnnnnnnnnnnnnnnnnnnnnnnnnnnnnnnnnnnnnnnnnnnnnnnnnnnnnnnnnnnnnnnnnnnnnnnnnnnnnnnnnnnnnnnnnnnnnnnnnnnnnnnnnnnnnnnnnnnnnnnnnnnnnnnnnnnnnnnnnnnnnnnnnnnnnnnnnnnnnnnnnnnnnnnnnnnnnnnnnnnnnnnnnnnnnnnnnnnnnnnnnnnnnnnnnnnnnnnnnnnnnnnnnnnnnnnnnnnnnnnnnnnnnnnnnnnnnnnnnnnnnnnnnnnnnnnnnnnnnnnnnnnnnnnnnnnnnnnnnnnnnnnnnnnnnnnnnnnnnnnnnnnnnnnnnnnnnnnnnnnnnnnnnnnnnnnnnnnnnnnnnnnnnnnnnnnnnnnnnnnnnnnnnnnnnnnnnnnnnnnnnnnnnnnnnnnnnnnnnnnnnnnnnnnnnnnnnnnnnnnnnnnnnnnnnnnnnnnnnnnnnnnnnnnnnnnnnnnnnnnnnnnnnnnnnnnnnnnnnnnnnnnnnnnnnnnnnnnnnnnnnnnnnnnnnnnnnnnnnnnnnnnnnnnnnnnnnnnnnnnnnnnnnnnnnnnnnnnnnnnnnnnnnnnnnnnnnnnnnnnnnnnnnnnnnnnnnnnnnnnnnnnnnnnnnnnnnnnnnnnnnnnnnnnnnnnnnnnnnnnnnnnnnnnnnnnnnnnnnnnnnnnnnnnnnnnnnnnnnnnnnnnnnnnnnnnnnnnnnnnnnnnnnnnnnnnnnnnnnnnnnnnnnnnnnnnnnnnnnnnnnnnnnnnnnnnnnnnnnnnnnnnnnnnnnnnnnnnnnnnnnnnnnnnnnnnnnnnnnnnnnnnnnnnnnnnnnnnnnnnnnnnnnnnnnnnnnnnnnnnnnnnnnnnnnnnnnnnnnnnnnnnnnnnnnnnnnnnnnnnnnnnnnnnnnnnnnnnnnnnnnnnnnnnnnnnnnnnnnnnnnnnnnnnnnnnnnnnnnnnnnnnnnnnnnnnnnnnnnnnnnnnnnnnnnnnnnnnnnnnnnnnnnnnnnnnnnnnnnnnnnnnnnnnnnnnnnnnnnnnnnnnnnnnnnnnnnnnnnnnnnnnnnnnnnnnnnnnnnnnnnnnnnnnnnnnnnnnnnnnnnnnnnnnnnnnnnnnnnnnnnnnnnnnnnnnnnnnnnnnnnnnnnnnnnnnnnnnnnnnnnnnnnnnnnnnnnnnnnnnnnnnnnnnnnnnnnnnnnnnnnnnnnnnnnnnnnnnnnnnnnnnnnnnnnnnnnnnnnnnnnnnnnnnnnnnnnnnnnnnnnnnnnnnnnnnnnnnnnnnnnnnnnnnnnnnnnnnnnnnnnnnnnnnnnnnnnnnnnnnnnnnnnnnnnnnnnnnnnnnnnnnnnnnnnnnnnnnnnnnnnnnnnnnnnnnnnnnnnnnnnnnnnnnnnnnnnnnnnnnnnnnnnnnnnnnnnnnnnnnnnnnnnnnnnnnnnnnnnnnnnnnnnnnnnnnnnnnnnnnnnnnnnnnnnnnnnnnnnnnnnnnnnnnnnnnnnnnnnnnnnnnnnnnnnnnnnnnnnnnnnnnnnnnnnnnnnnnnnnnnnnnnnnnnnnnnnnnnnnnnnnnnnnnnnnnnnnnnnnnnnnnnnnnnnnnnnnnnnnnnnnnnnnnnnnnnnnnnnnnnnnnnnnnnnnnnnnnnnnnnnnnnnnnnnnnnnnnnnnnnnnnnnnnnnnnnnnnnnnnnnnnnnnnnnnnnnnnnnnnnnnnnnnnnnnnnnnnnnnnnnnnnnnnnnnnnnnnnnnnnnnnnnnnnnnnnnnnnnnnnnnnnnnnnnnnnnnnnnnnnnnnnnnnnnnnnnnnnnnnnnnnnnnnnnnnnnnnnnnnnnnnnnnnnnnnnnnnnnnnnnnnnnnnnnnnnnnnnnnnnnnnnnnnnnnnnnnnnnnnnnnnnnnnnnnnnnnnnnnnnnnnnnnnnnnnnnnnnnnnnnnnnnnnnnnnnnnnnnnnnnnnnnnnnnnnnnnnnnnnnnnnnnnnnnnnnnnnnnnnnnnnnnnnnnnnnnnnnnnnnnnnnnnnnnnnnnnnnnnnnnnnnnnnnnnnnnnnnnnnnnnnnnnnnnnnnnnnnnnnnnnnnnnnnnnnnnnnnnnnnnnnnnnnnnnnnnnnnnnnnnnnnnnnnnnnnnnnnnnnnnnnnnnnnnnnnnnnnnnnnnnnnnnnnnnnnnnnnnnnnnnnnnnnnnnnnnnnnnnnnnnnnnnnnnnnnnnnnnnnnnnnnnnnnnnnnnnnnnnnnnnnnnnnnnnnnnnnnnnnnnnnnnnnnnnnnnnnnnnnnnnnnnnnnnnnnnnnnnnnnnnnnnnnnnnnnnnnnnnnnnnnnnnnnnnnnnnnnnnnnnnnnnnnnnnnnnnnnnnnnnnnnnnnnnnnnnnnnnnnnnnnnnnnnnnnnnnnnnnnnnnnnnnnnnnnnnnnnnnnnnnnnnnnnnnnnnnnnnnnnnnnnnnnnnnnnnnnnnnnnnnnnnnnnnnnnnnnnnnnnnnnnnnnnnnnnnnnnnnnnnnnnnnnnnnnnnnnnnnnnnnnnnnnnnnnnnnnnnnnnnnnnnnnnnnnnnnnnnnnnnnnnnnnnnnnnnnnnnnnnnnnnnnnnnnnnnnnnnnnnnnnnnnnnnnnnnnnnnnnnnnnnnnnnnnnnnnnnnnnnnnnnnnnnnnnnnnnnnnnnnnnnnnnnnnnnnnnnnnnnnnnnnnnnnnnnnnnnnnnnnnnnnnnnnnnnnnnnnnnnnnnnnnnnnnnnnnnnnnnnnnnnnnnnnnnnnnnnnnnnnnnnnnnnnnnnnnnnnnnnnnnnnnnnnnnnnnnnnnnnnnnnnnnnnnnnnnnnnnnnnnnnnnnnnnnnnnnnnnnnnnnnnnnnnnnnnnnnnnnnnnnnnnnnnnnnnnnnnnnnnnnnnnnnnnnnnnnnnnnnnnnnnnnnnnnnnnnnnnnnnnnnnnnnnnnnnnnnnnnnnnnnnnnnnnnnnnnnnnnnnnnnnnnnnnnnnnnnnnnnnnnnnnnnnnnnnnnnnnnnnnnnnnnnnnnnnnnnnnnnnnnnnnnnnnnnnnnnnnnnnnnnnnnnnnnnnnnnnnnnnnnnnnnnnnnnnnnnnnnnnnnnnnnnnnnnnnnnnnnnnnnnnnnnnnnnnnnnnnnnnnnnnnnnnnnnnnnnnnnnnnnnnnnnnnnnnnnnnnnnnnnnnnnnnnnnnnnnnnnnnnnnnnnnnnnnnnnnnnnnnnnnnnnnnnnnnnnnnnnnnnnnnnnnnnnnnnnnnnnnnnnnnnnnnnnnnnnnnnnnnnnnnnnnnnnnnnnnnnnnnnnnnnnnnnnnnnnnnnnnnnnnnnnnnnnnnnnnnnnnnnnnnnnnnnnnnnnnnnnnnnnnnnnnnnnnnnnnnnnnnnnnnnnnnnnnnnnnnnnnnnnnnnnnnnnnnnnnnnnnnnnnnnnnnnnnnnnnnnnnnnnnnnnnnnnnnnnnnnnnnnnnnnnnnnnnnnnnnnnnnnnnnnnnnnnnnnnnnnnnnnnnnnnnnnnnnnnnnnnnnnnnnnagcaagcacattgaccgaaccgcccttcgacgaaccagtgccaccactcacaccgatgtcccctccagtgctggaagatccacctgtcatggcgacagcaccgccgacaccgctagcggagttcgatgcgccgcctgccacacgcacggacccgactgaggcggaagacgcggaagcaccactgctgatgagcacatcgcccgacagaccgctcgaggagctacccgattcgatctggacggctccactgctcgcagatgatgacaccgcagcagagcgcaagcccactttgcctgagtcgcccacaacggacgtgcccgacacgatgctcacgctcccaccagcggccttcgagctgtcgcccgcgccaacaagcacactgccgccacttccagtcgatgaaaaacctcccgaaatggacgtcagtcctacactcgtatccgcatcgccagttgtcagcgtcacgttcccgcttccgcgcgccttggagcccgagctagacgcggaagagatcgaaacttcgccagtggcaccgccagccgaagcgcccgactggacgctcactgacccaccggcgccactggaaccggacgcaccggccgacaacgtcactcgtccaccacttccagctgagctggaaccagcgccgatcgccacgctgccactgttgccattcaccgagtcacctgaaagaagttcaatccaaccggttgaaccgagattggtatttcccgacgccagtataatatccccagagtcaccggcagttcccgaggtagttgtaccaacgcttacgcttcctgaagtacctccactgctcccccctgacgaaattgcaatcgatccaccaacacttgcatcaccagaagtcgttccaccctcaagggaaatactgccgccctggtcgttactatcgccaacaccaacaacaatgttgccggcttggccgttaggggcatcccctgaaacgatttgaatactgccagatgagcttgattcagacttgccagactcgatcgagacagaaccagttcctgccgtgctgctactggtagcgtatccacccgagtctgcgctagacacggttacatccccgcttttttctggtgcattggccgacacatgaaaacgtcgatgttgggcatgaatagcagcaacgaggtcgaggatgactttctgcttatcgatttgatgaaagttcatcagaccgaaatcgctttcgttcagatagaagtcttggacactgacgtattctgggaaggtttcgcgagcttgttgagcaatcactccgcgcacaaccgaatcttcgatgccacgaatccgtctccattcgtctgtgtatcgatactgtttgatttcaagcgtctgcaaccgctgaagaatatcatcctcgtccacgtcctcgatgttggtcttgattcgtcgatccgagggagatatgacttgggggaattgtgctggaacggtaccaaccaccatatcattacgcacgcgaaaaacaatcccgtccgccgtatttgaattcggattttcgaagagcgcttcttgtgtagaagtttgtttggtaaacacaccgtcaatagatacgtcgccaccatcacttgcaatagaaacactcccgtcacttccgatatcaacggaccccttccgatcaccagatacaatagacactgctccgccagcgctaccactgccagcgctaatagcaataccacccacttgggtaacgtcagagctcgactgcgtctcgatggacacctgacccggaacaccactttcggaatcgccacctgacagcatcaggtcacctcccacaccactggaagatgaaccaccggagacgctaaccgcgccgccagatccactggatgaggaagttccgccgctcacgtccacggaaccggacgaacccgtctccgaatcgccgccagtcacgagaacacttcctcccgactctgccgcgccgctggaaccgcccgccacgctcagcaaaccaccggaccccgttgtactagatccgctggccacattaacagcaccagatgcgccgtccaccgcagagccagacacgaccgacacaccaccagacgcagacgtaccgctagcaatgccgcttccgaccgacacaacgccgctcgagacactgccagtgccgctagacaccgacaccgcgccgcccgtcgacgagctgctagaaccgcccgacacaaacacactgcctgctgtggtagacgcctcgccagactgcacggacacgtcgccgctgctacccgaccccgaagaaccggaagacagcgtcaccacgcccgacgctgcatccaccgacgcgccgctcccgatcgtcgcagaaccgctcaatgcgtctccgctcgcagaagcaccgctcgtcacgctcacgtcgccgctgcccagcaaacccgcacccgaagcaatgtccacgacaccacctgcgccagcatcgcttgcgccgccggccagaacgatgccgcctccggtcgcagcgctagacgaaccgacaccgccagttaaggcgacgcctccagcaacaccagatgacgccgtcagagatccgccgcgcacactcaccgagccgccacccgtagtgctatccgtactatcgccggcaacaacttcgaccgtgccgccggcagcactgcgacgaacaccgctcgacaagctcaccgcgccgtcctcgccggacgacacgaacacagagcccccgcgcgcgctcgtgcttccagtcggcccgccgcgaatctgcacgctgcctgcgtccgacgagtctgaaacaccgctcgacacgaccacagacccgctcgacccgctcgcgctgccgccagacgcaactgacaacaatcccgacgcgccggagtcggcatcgccagtgctgacgcccacgtcaccgctcacgctcgagcctgtggcagccgcgctcgacaccgtaacgacgccgctgctcgcactggccgcgccgcnnnnnnnnnnnnnnnnnnnnnnnnnnnnnnnnnnnnnnnnnnnnnnnnnnnnnnnnnnnnnnnnnnnnnnnnnnnnnnnnnnnnnnnnnnnnnnnnnnnnnnnnnnnnnnnnnnnnnnnnnnnnnnnnnnnnnnnnnnnnnnnnnnnnnnnnnnnnnnnnnnnnnnnnnnnnnnnnnnnnnnnnnnnnnnnnnnnnnnnnnnnnnnnnnnnnnnnnnnnnnnnnnnnnnnnnnnnnnnnnnnnnnnnnnnnnnnnnnnnnnnnnnnnnnnnnnnnnnnnnnnnnnnnnnnnnnnnnnnnnnnnnnnnnnnnnnnnnnnnnnnnnnnnnnnnnnnnnnnnnnnnnnnnnnnnnnnnnnnnnnnnnnnnnnnnnnnnnnnnnnnnnnnnnnnnnnnnnnnnnnnnnnnnnnnnnnnnnnnnnnnnnnnnnnnnnnnnnnnnnnnnnnnnnnnnnnnnnnnnnnnnnnnnnnnnnnnnnnnnnnnnnnnnnnnnnnnnnnnnnnnnnnnnnnnnnnnnnnnnnnnnnnnnnnnnnnnnnnnnnnnnnnnnnnnnnnnnnnnnnnnnnnnnnnnnnnnnnnnnnnnnnnnnnnnnnnnnnnnnnnnnnnnnnnnnnnnnnnnnnnnnnnnnnnnnnnnnnnnnnnnnnnnnnnnnnnnnnnnnnnnnnnnnnnnnnnnnnnnnnnnnnnnnnnnnnnnnnnnnnnnnnnnnnnnnnnnnnnnnnnnnnnnnnnnnnnnnnnnnnnnnnnnnnnnnnnnnnnnnnnnnnnnnnnnnnnnnnnnnnnnnnnnnnnnnnnnnnnnnnnnnnnnnnnnnnnnnnnnnnnnnnnnnnnnnnnnnnnnnnnnnnnnnnnnnnnnnnnnnnnnnnnnnnnnnnnnnnnnnnnnnnnnnnnnnnnnnnnnnnnnnnnnnnnnnnnnnnnnnnnnnnnnnnnnnnnnnnnnnnnnnnnnnnnnnnnnnnnnnnnnnnnnnnnnnnnnnnnnnnnnnnnnnnnnnnnnnnnnnnnnnnnnnnnnnnnnnnnnnnnnnnnnnnnnnnnnnnnnnnnnnnnnnnnnnnnnnnnnnnnnnnnnnnnnnnnnnnnnnnnnnnnnnnnnnnnnnnnnnnnnnnnnnnnnnnnnnnnnnnnnnnnnnnnnnnnnnnnnnnnnnnnnnnnnnnnnnnnnnnnnnnnnnnnnnnnnnnnnnnnnnnnnnnnnnnnnnnnnnnnnnnnnnnnnnnnnnnnnnnnnnnnnnnnnnnnnnnnnnnnnnnnnnnnnnnnnnnnnnnnnnnnnnnnnnnnnnnnnnnnnnnnnnnnnnnnnnnnnnnnnnnnnnnnnnnnnnnnnnnnnnnnnnnnnnnnnnnnnnnnnnnnnnnnnnnnnnnnnnnnnnnnnnnnnnnnnnnnnnnnnnnnnnnnnnnnnnnnnnnnnnnnnnnnnnnnnnnnnnnnnnnnnnnnnnnnnnnnnnnnnnnnnnnnnnnnnnnnnnnnnnnnnnnnnnnnnnnnnnnnnnnnnnnnnnnnnnnnnnnnnnnnnnnnnnnnnnnnnnnnnnnnnnnnnnnnnnnnnnnnnnnnnnnnnnnnnnnnnnnnnnnnnnnnnnnnnnnnnnnnnnnnnnnnnnnnnnnnnnnnnnnnnnnnnnnnnnnnnnnnnnnnnnnnnnnnnnnnnnnnnnnnnnnnnnnnnnnnnnnnnnnnnnnnnnnnnnnnnnnnnnnnnnnnnnnnnnnnnnnnnnnnnnnnnnnnnnnnnnnnnnnnnnnnnnnnnnnnnnnnnnnnnnnnnnnnnnnnnnnnnnnnnnnnnnnnnnnnnnnnnnnnnnnnnnnnnnnnnnnnnnnnnnnnnnnnnnnnnnnnnnnnnnnnnnnnnnnnnnnnnnnnnnnnnnnnnnnnnnnnnnnnnnnnnnnnnnnnnnnnnnnnnnnnnnnnnnnnnnnnnnnnnnnnnnnnnnnnnnnnnnnnnnnnnnnnnnnnnnnnnnnnnnnnnnnnnnnnnnnnnnnnnnnnnnnnnnnnnnnnnnnnnnnnnnnnnnnnnnnnnnnnnnnnnnnnnnnnnnnnnnnnnnnnnnnnnnnnnnnnnnnnnnnnnnnnnnnnnnnnnnnnnnnnnnnnnnnnnnnnnnnnnnnnnnnnnnnnnnnnnnnnnnnnnnnnnnnnnnnnnnnnnnnnnnnnnnnnnnnnnnnnnnnnnnnnnnnnnnnnnnnnnnnnnnnnnnnnnnnnnnnnnnnnnnnnnnnnnnnnnnnnnnnnnnnnnnnnnnnnnnnnnnnnnnnnnnnnnnnnnnnnnnnnnnnnnnnnnnnnnnnnnnnnnnnnnnnnnnnnnnnnnnnnnnnnnnnnnnnnnnnnnnnnnnnnnnnnnnnnnnnnnnnnnnnnnnnnnnnnnnnnnnnnnnnnnnnnnnnnnnnnnnnnnnnnnnnnnnnnnnnnnnnnnnnnnnnnnnnnnnnnnnnnnnnnnnnnnnnnnnnnnnnnnnnnnnnnnnnnnnnnnnnnnnnnnnnnnnnnnnnnnnnnnnnnnnnnnnnnnnnnnnnnnnnnnnnnnnnnnnnnnnnnnnnnnnnnnnnnnnnnnnnnnnnnnnnnnnnnnnnnnnnnnnnnnnnnnnnnnnnnnnnnnnnnnnnnnnnnnnnnnnnnnnnnnnnnnnnnnnnnnnnnnnnnnnnnnnnnnnnnnnnnnnnnnnnnnnnnnnnnnnnnnnnnnnnnnnnnnnnnnnnnnnnnnnnnnnnnnnnnnnnnnnnnnnnnnnnnnnnnnnnnnnnnnnnnnnnnnnnnnnnnnnnnnnnnnnnnnnnnnnnnnnnnnnnnnnnnnnnnnnnnnnnnnnnnnnnnnnnnnnnnnnnnnnnnnnnnnnnnnnnnnnnnnnnnnnnnnnnnnnnnnnnnnnnnnnnnnnnnnnnnnnnnnnnnnnnnnnnnnnnnnnnnnnnnnnnnnnnnnnnnnnnnnnnnnnnnnnnnnnnnnnnnnnnnnnnnnnnnnnnnnnnnnnnnnnnnnnnnnnnnnnnnnnnnnnnnnnnnnnnnnnnnnnnnnnnnnnnnnnnnnnnnnnnnnnnnnnnnnnnnnnnnnnnnnnnnnnnnnnnnnnnnnnnnnnnnnnnnnnnnnnnnnnnnnnnnnnnnnnnnnnnnnnnnnnnnnnnnnnnnnnnnnnnnnnnnnnnnnnnnnnnnnnnnnnnnnnnnnnnnnnnnnnnnnnnnnnnnnnnnnnnnnnnnnnnnnnnnnnnnnnnnnnnnnnnnnnnnnnnnnnnnnnnnnnnnnnnnnnnnnnnnnnnnnnnnnnnnnnnnnnnnnnnnnnnnnnnnnnnnnnnnnnnnnnnnnnnnnnnnnnnnnnnnnnnnnnnnnnnnnnnnnnnnnnnnnnnnnnnnnnnnnnnnnnnnnnnnnnnnnnnnnnnnnnnnnnnnnnnnnnnnnnnnnnnnnnnnnnnnnnnnnnnnnnnnnnnnnnnnnnnnnnnnnnnnnnnnnnnnnnnnnnnnnnnnnnnnnnnnnnnnnnnnnnnnnnnnnnnnnnnnnnnnnnnnnnnnnnnnnnnnnnnnnnnnnnnnnnnnnnnnnnnnnnnnnnnnnnnnnnnnnnnnnnnnnnnnnnnnnnnnnnnnnnnnnnnnnnnnnnnnnnnnnnnnnnnnnnnnnnnnnnnnnnnnnnnnnnnnnnnnnnnnnnnnnnnnnnnnnnnnnnnnnnnnnnnnnnnnnnnnnnnnnnnnnnnnnnnnnnnnnnnnnnnnnnnnnnnnnnnnnnnnnnnnnnnnnnnnnnnnnnnnnnnnnnnnnnnnnnnnnnnnnnnnnnnnnnnnnnnnnnnnnnnnnnnnnnnnnnnnnnnnnnnnnnnnnnnnnnnnnnnnnnnnnnnnnnnnnnnnnnnnnnnnnnnnnnnnnnnnnnnnnnnnnnnnnnnnnnnnnnnnnnnnnnnnnnnnnnnnnnnnnnnnnnnnnnnnnnnnnnnnnnnnnnnnnnnnnnnnnnnnnnnnnnnnnnnnnnnnnnnnnnnnnnnnnnnnnnnnnnnnnnnnnnnnnnnnnnnnnnnnnnnnnnnnnnnnnnnnnnnnnnnnnnnnnnnnnnnnnnnnnnnnnnnnnnnnnnnnnnnnnnnnnnnnnnnnnnnnnnnnnnnnnnnnnnnnnnnnnnnnnnnnnnnnnnnnnnnnnnnnnnnnnnnnnnnnnnnnnnnnnnnnnnnnnnnnnnnnnnnnnnnnnnnnnnnnnnnnnnnnnnnnnnnnnnnnnnnnnnnnnnnnnnnnnnnnnnnnnnnnnnnnnnnnnnnnnnnnnnnnnnnnnnnnnnnnnnnnnnnnnnnnnnnnnnnnnnnnnnnnnnnnnnnnnnnnnnnnnnnnnnnnnnnnnnnnnnnnnnnnnnnnnnnnnnnnnnnnnnnnnnnnnnnnnnnnnnnnnnnnnnnnnnnnnnnnnnnnnnnnnnnnnnnnnnnnnnnnnnnnnnnnnnnnnnnnnnnnnnnnnnnnnnnnnnnnnnnnnnnnnnnnnnnnnnnnnnnnnnnnnnnnnnnnnnnnnnnnnnnnnnnnnnnnnnnnnnnnnnnnnnnnnnnnnnnnnnnnnnnnnnnnnnnnnnnnnnnnnnnnnnnnnnnnnnnnnnnnnnnnnnnnnnnnnnnnnnnnnnnnnnnnnnnnnnnnnnnnnnnnnnnnnnnnnnnnnnnnnnnnnnnnnnnnnnnnnnnnnnnnnnnnnnnnnnnnnnnnnnnnnnnnnnnnnnnnnnnnnnnnnnnnnnnnnnnnnnnnnnnnnnnnnnnnnnnnnnnnnnnnnnnnnnnnnnnnnnnnnnnnnnnnnnnnnnnnnnnnnnnnnnnnnnnnnnnnnnnnnnnnnnnnnnnnnnnnnnnnnnnnnnnnnnnnnnnnnnnnnnnnnnnnnnnnnnnnnnnnnnnnnnnnnnnnnnnnnnnnnnnnnnnnnnnnnnnnnnnnnnnnnnnnnnnnnnnnnnnnnnnnnnnnnnnnnnnnnnnnnnnnnnnnnnnnnnnnnnnnnnnnnnnnnnnnnnnnnnnnnnnnnnnnnnnnnnnnnnnnnnnnnnnnnnnnnnnnnnnnnnnnnnnnnnnnnnnnnnnnnnnnnnnnnnnnnnnnnnnnnnnnnnnnnnnnnnnnnnnnnnnnnnnnnnnnnnnnnnnnnnnnnnnnnnnnnnnnnnnnnnnnnnnnnnnnnnnnnnnnnnnnnnnnnnnnnnnnnnnnnnnnnnnnnnnnnnnnnnnnnnnnnnnnnnnnnnnnnnnnnnnnnnnnnnnnnnnnnnnnnnnnnnnnnnnnnnnnnnnnnnnnnnnnnnnnnnnnnnnnnnnnnnnnnnnnnnnnnnnnnnnnnnnnnnnnnnnnnnnnnnnnnnnnnnnnnnnnnnnnnnnnnnnnnnnnnnnnnnnnnnnnnnnnnnnnnnnnnnnnnnnnnnnnnnnnnnnnnnnnnnnnnnnnnnnnnnnnnnnnnnnnnnnnnnnnnnnnnnnnnnnnnnnnnnnnnnnnnnnnnnnnnnnnnnnnnnnnnnnnnnnnnnnnnnnnnnnnnnnnnnnnnnnnnnnnnnnnnnnnnnnnnnnnnnnnnnnnnnnnnnnnnnnnnnnnnnnnnnnnnnnnnnnnnnnnnnnnnnnnnnnnnnnnnnnnnnnnnnnnnnnnnnnnnnnnnnnnnnnnnnnnnnnnnnnnnnnnnnnnnnnnnnnnnnnnnnnnnnnnnnnnnnnnnnnnnnnnnnnnnnnnnnnnnnnnnnnnnnnnnnnnnnnnnnnnnnnnnnnnnnnnnnnnnnnnnnnnnnnnnnnnnnnnnnnnnnnnnnnnnnnnnnnnnnnnnnnnnnnnnnnnnnnnnnnnnnnnnnnnnnnnnnnnnnnnnnnnnnnnnnnnnnnnnnnnnnnnnnnnnnnnnnnnnnnnnnnnnnnnnnnnnnnnnnnnnnnnnnnnnnnnnnnnnnnnnnnnnnnnnnnnnnnnnnnnnnnnnnnnnnnnnnnnnnnnnnnnnnnnnnnnnnnnnnnnnnnnnnnnnnnnnnnnnnnnnnnnnnnnnnnnnnnnnnnnnnnnnnnnnnnnnnnnnnnnnnnnnnnnnnnnnnnnnnnnnnnnnnnnnnnnnnnnnnnnnnnnnnnnnnnnnnnnnnnnnnnnnnnnnnnnnnnnnnnnnnnnnnnnnnnnnnnnnnnnnnnnnnnnnnnnnnnnnnnnnnnnnnnnnnnnnnnnnnnnnnnnnnnnnnnnnnnnnnnnnnnnnnnnnnnnnnnnnnnnnnnnnnnnnnnnnnnnnnnnnnnnnnnnnnnnnnnnnnnnnnnnnnnnnnnnnnnnnnnnnnnnnnnnnnnnnnnnnnnnnnnnnnnnnnnnnnnnnnnnnnnnnnnnnnnnnnnnnnnnnnnnnnnnnnnnnnnnnnnnnnnnnnnnnnnnnnnnnnnnnnnnnnnnnnnnnnnnnnnnnnnnnnnnnnnnnnnnnnnnnnnnnnnnnnnnnnnnnnnnnnnnnnnnnnnnnnnnnnnnnnnnnnnnnnnnnnnnnnnnnnnnnnnnnnnnnnnnnnnnnnnnnnnnnnnnnnnnnnnnnnnnnnnnnnnnnnnnnnnnnnnnnnnnnnnnnnnnnnnnnnnnnnnnnnnnnnnnnnnnnnnnnnnnnnnnnnnnnnnnnnnnnnnnnnnnnnnnnnnnnnnnnnnnnnnnnnnnnnnnnnnnnnnnnnnnnnnnnnnnnnnnnnnnnnnnnnnnnnnnnnnnnnnnnnnnnnnnnnnnnnnnnnnnnnnnnnnnnnnnnnnnnnnnnnnnnnnnnnnnnnnnnnnnnnnnnnnnnnnnnnnnnnnnnnnnnnnnnnnnnnnnnnnnnnnnnnnnnnnnnnnnnnnnnnnnnnnnnnnnnnnnnnnnnnnnnnnnnnnnnnnnnnnnnnnnnnnnnnnnnnnnnnnnnnnnnnnnnnnnnnnnnnnnnnnnnnnnnnnnnnnnnnnnnnnnnnnnnnnnnnnnnnnnnnnnnnnnnnnnnnnnnnnnnnnnnnnnnnnnnnnnnnnnnnnnnnnnnnnnnnnnnnnnnnnnnnnnnnnnnnnnnnnnnnnnnnnnnnnnnnnnnnnnnnnnnnnnnnnnnnnnnnnnnnnnnnnnnnnnnnnnnnnnnnnnnnnnnnnnnnnnnnnnnnnnnnnnnnnnnnnnnnnnnnnnnnnnnnnnnnnnnnnnnnnnnnnnnnnnnnnnnnnnnnnnnnnnnnnnnnnnnnnnnnnnnnnnnnnnnnnnnnnnnnnnnnnnnnnnnnnnnnnnnnnnnnnnnnnnnnnnnnnnnnnnnnnnnnnnnnnnnnnnnnnnnnnnnnnnnnnnnnnnnnnnnnnnnnnnnnnnnnnnnnnnnnnnnnnnnnnnnnnnnnnnnnnnnnnnnnnnnnnnnnnnnnnnnnnnnnnnnnnnnnnnnnnnnnnnnnnnnnnnnnnnnnnnnnnnnnnnnnnnnnnnnnnnnnnnnnnnnnnnnnnnnnnnnnnnnnnnnnnnnnnnnnnnnnnnnnnnnnnnnnnnnnnnnnnnnnnnnnnnnnnnnnnnnnnnnnnnnnnnnnnnnnnnnnnnnnnnnnnnnnnnnnnnnnnnnnnnnnnnnnnnnnnnnnnnnnnnnnnnnnnnnnnnnnnnnnnnnnnnnnnnnnnnnnnnnnnnnnnnnnnnnnnnnnnnnnnnnnnnnnnnnnnnnnnnnnnnnnnnnnnnnnnnnnnnnnnnnnnnnnnnnnnnnnnnnnnnnnnnnnnnnnnnnnnnnnnnnnnnnnnnnnnnnnnnnnnnnnnnnnnnnnnnnnnnnnnnnnnnnnnnnnnnnnnnnnnnnnnnnnnnnnnnnnnnnnnnnnnnnnnnnnnnnnnnnnnnnnnnnnnnnnnnnnnnnnnnnnnnnnnnnnnnnnnnnnnnnnnnnnnnnnnnnnnnnnnnnnnnnnnnnnnnnnnnnnnnnnnnnnnnnnnnnnnnnnnnnnnnnnnnnnnnnnnnnnnnnnnnnnnnnnnnnnnnnnnnnnnnnnnnnnnnnnnnnnnnnnnnnnnnnnnnnnnnnnnnnnnnnnnnnnnnnnnnnnnnnnnnnnnnnnnnnnnnnnnnnnnnnnnnnnnnnnnnnnnnnnnnnnnnnnnnnnnnnnnnnnnnnnnnnnnnnnnnnnnnnnnnnnnnnnnnnnnnnnnnnnnnnnnnnnnnnnnnnnnnnnnnnnnnnnnnnnnnnnnnnnnnnnnnnnnnnnnnnnnnnnnnnnnnnnnnnnnnnnnnnnnnnnnnnnnnnnnnnnnnnnnnnnnnnnnnnnnnnnnnnnnnnnnnnnnnnnnnnnnnnnnnnnnnnnnnnnnnnnnnnnnnnnnnnnnnnnnnnnnnnnnnnnnnnnnnnnnnnnnnnnnnnnnnnnnnnnnnnnnnnnnnnnnnnnnnnnnnnnnnnnnnnnnnnnnnnnnnnnnnnnnnnnnnnnnnnnnnnnnnnnnnnnnnnnnnnnnnnnnnnnnnnnnnnnnnnnnnnnnnnnnnnnnnnnnnnnnnnnnnnnnnnnnnnnnnnnnnnnnnnnnnnnnnnnnnnnnnnnnnnnnnnnnnnnnnnnnnnnnnnnnnnnnnnnnnnnnnnnnnnnnnnnnnnnnnnnnnnnnnnnnnnnnnnnnnnnnnnnnnnnnnnnnnnnnnnnnnnnnnnnnnnnnnnnnnnnnnnnnnnnnnnnnnnnnnnnnnnnnnnnnnnnnnnnnnnnnnnnnnnnnnnnnnnnnnnnnnnnnnnnnnnnnnnnnnnnnnnnnnnnnnnnnnnnnnnnnnnnnnnnnnnnnnnnnnnnnnnnnnnnnnnnnnnnnnnnnnnnnnnnnnnnnnnnnnnnnnnnnnnnnnnnnnnnnnnnnnnnnnnnnnnnnnnnnnnnnnnnnnnnnnnnnnnnnnnnnnnnnnnnnnnnnnnnnnnnnnnnnnnnnnnnnnnnnnnnnnnnnnnnnnnnnnnnnnnnnnnnnnnnnnnnnnnnnnnnnnnnnnnnnnnnnnnnnnnnnnnnnnnnnnnnnnnnnnnnnnnnnnnnnnnnnnnnnnnnnnnnnnnnnnnnnnnnnnnnnnnnnnnnnnnnnnnnnnnnnnnnnnnnnnnnnnnnnnnnnnnnnnnnnnnnnnnnnnnnnnnnnnnnnnnnnnnnnnnnnnnnnnnnnnnnnnnnnnnnnnnnnnnnnnnnnnnnnnnnnnnnnnnnnnnnnnnnnnnnnnnnnnnnnnnnnnnnnnnnnnnnnnnnnnnnnnnnnnnnnnnnnnnnnnnnnnnnnnnnnnnnnnnnnnnnnnnnnnnnnnnnnnnnnnnnnnnnnnnnnnnnnnnnnnnnnnnnnnnnnnnnnnnnnnnnnnnnnnnnnnnnnnnnnnnnnnnnnnnnnnnnnnnnnnnnnnnnnnnnnnnnnnnnnnnnnnnnnnnnnnnnnnnnnnnnnnnnnnnnnnnnnnnnnnnnnnnnnnnnnnnnnnnnnnnnnnnnnnnnnnnnnnnnnnnnnnnnnnnnnnnnnnnnnnnnnnnnnnnnnnnnnnnnnnnnnnnnnnnnnnnnnnnnnnnnnnnnnnnnnnnnnnnnnnnnnnnnnnnnnnnnnnnnnnnnnnnnnnnnnnnnnnnnnnnnnnnnnnnnnnnnnnnnnnnnnnnnnnnnnnnnnnnnnnnnnnnnnnnnnnnnnnnnnnnnnnnnnnnnnnnnnnnnnnnnnnnnnnnnnnnnnnnnnnnnnnnnnnnnnnnnnnnnnnnnnnnnnnnnnnnnnnnnnnnnnnnnnnnnnnnnnnnnnnnnnnnnnnnnnnnnnnnnnnnnnnnnnnnnnnnnnnnnnnnnnnnnnnnnnnnnnnnnnnnnnnnnnnnnnnnnnnnnnnnnnnnnnnnnnnnnnnnnnnnnnnnnnnnnnnnnnnnnnnnnnnnnnnnnnnnnnnnnnnnnnnnnnnnnnnnnnnnnnnnnnnnnnnnnnnnnnnnnnnnnnnnnnnnnnnnnnnnnnnnnnnnnnnnnnnnnnnnnnnnnnnnnnnnnnnnnnnnnnnnnnnnnnnnnnnnnnnnnnnnnnnnnnnnnnnnnnnnnnnnnnnnnnnnnnnnnnnnnnnnnnnnnnnnnnnnnnnnnnnnnnnnnnnnnnnnnnnnnnnnnnnnnnnnnnnnnnnnnnnnnnnnnnnnnnnnnnnnnnnnnnnnnnnnnnnnnnnnnnnnnnnnnnnnnnnnnnnnnnnnnnnnnnnnnnnnnnnnnnnnnnnnnnnnnnnnnnnnnnnnnnnnnnnnnnnnnnnnnnnnnnnnnnnnnnnnnnnnnnnnnnnnnnnnnnnnnnnnnnnnnnnnnnnnnnnnnnnnnnnnnnnnnnnnnnnnnnnnnnnnnnnnnnnnnnnnnnnnnnnnnnnnnnnnnnnnnnnnnnnnnnnnnnnnnnnnnnnnnnnnnnnnnnnnnnnnnnnnnnnnnnnnnnnnnnnnnnnnnnnnnnnnnnnnnnnnnnnnnnnnnnnnnnnnnnnnnnnnnnnnnnnnnnnnnnnnnnnnnnnnnnnnnnnnnnnnnnnnnnnnnnnnnnnnnnnnnnnnnnnnnnnnnnnnnnnnnnnnnnnnnnnnnnnnnnnnnnnnnnnnnnnnnnnnnnnnnnnnnnnnnnnnnnnnnnnnnnnnnnnnnnnnnnnnnnnnnnnnnnnnnnnnnnnnnnnnnnnnnnnnnnnnnnnnnnnnnnnnnnnnnnnnnnnnnnnnnnnnnnnnnnnnnnnnnnnnnnnnnnnnnnnnnnnnnnnnnnnnnnnnnnnnnnnnnnnnnnnnnnnnnnnnnnnnnnnnnnnnnnnnnnnnnnnnnnnnnnnnnnnnnnnnnnnnnnnnnnnnnnnnnnnnnnnnnnnnnnnnnnnnnnnnnnnnnnnnnnnnnnnnnnnnnnnnnnnnnnnnnnnnnnnnnnnnnnnnnnnnnnnnnnnnnnnnnnnnnnnnnnnnnnnnnnnnnnnnnnnnnnnnnnnnnnnnnnnnnnnnnnnnnnnnnnnnnnnnnnnnnnnnnnnnnnnnnnnnnnnnnnnnnnnnnnnnnnnnnnnnnnnnnnnnnnnnnnnnnnnnnnnnnnnnnnnnnnnnnnnnnnnnnnnnnnnnnnnnnnnnnnnnnnnnnnnnnnnnnnnnnnnnnnnnnnnnnnnnnnnnnnnnnnnnnnnnnnnnnnnnnnnnnnnnnnnnnnnnnnnnnnnnnnnnnnnnnnnnnnnnnnnnnnnnnnnnnnnnnnnnnnnnnnnnnnnnnnnnnnnnnnnnnnnnnnnnnnnnnnnnnnnnnnnnnnnnnnnnnnnnnnnnnnnnnnnnnnnnnnnnnnnnnnnnnnnnnnnnnnnnnnnnnnnnnnnnnnnnnnnnnnnnnnnnnnnnnnnnnnnnnnnnnnnnnnnnnnnnnnnnnnnnnnnnnnnnnnnnnnnnnnnnnnnnnnnnnnnnnnnnnnnnnnnnnnnnnnnnnnnnnnnnnnnnnnnnnnnnnnnnnnnnnnnnnnnnnnnnnnnnnnnnnnnnnnnnnnnnnnnnnnnnnnnnnnnnnnnnnnnnnnnnnnnnnnnnnnnnnnnnnnnnnnnnnnnnnnnnnnnnnnnnnnnnnnnnnnnnnnnnnnnnnnnnnnnnnnnnnnnnnnnnnnnnnnnnnnnnnnnnnnnnnnnnnnnnnnnnnnnnnnnnnnnnnnnnnnnnnnnnnnnnnnnnnnnnnnnnnnnnnnnnnnnnnnnnnnnnnnnnnnnnnnnnnnnnnnnnnnnnnnnnnnnnnnnnnnnnnnnnnnnnnnnnnnnnnnnnnnnnnnnnnnnnnnnnnnnnnnnnnnnnnnnnnnnnnnnnnnnnnnnnnnnnnnnnnnnnnnnnnnnnnnnnnnnnnnnnnnnnnnnnnnnnnnnnnnnnnnnnnnnnnnnnnnnnnnnnnnnnnnnnnnnnnnnnnnnnnnnnnnnnnnnnnnnnnnnnnnnnnnnnnnnnnnnnnnnnnnnnnnnnnnnnnnnnnnnnnnnnnnnnnnnnnnnnnnnnnnnnnnnnnnnnnnnnnnnnnnnnnnnnnnnnnnnnnnnnnnnnnnnnnnnnnnnnnnnnnnnnnnnnnnnnnnnnnnnnnnnnnnnnnnnnnnnnnnnnnnnnnnnnnnnnnnnnnnnnnnnnnnnnnnnnnnnnnnnnnnnnnnnnnnnnnnnnnnnnnnnnnnnnnnnnnnnnnnnnnnnnnnnnnnnnnnnnnnnnnnnnnnnnnnnnnnnnnnnnnnnnnnnnnnnnnnnnnnnnnnnnnnnnnnnnnnnnnnnnnnnnnnnnnnnnnnnnnnnnnnnnnnnnnnnnnnnnnnnnnnnnnnnnnnnnnnnnnnnnnnnnnnnnnnnnnnnnnnnnnnnnnnnnnnnnnnnnnnnnnnnnnnnnnnnnnnnnnnnnnnnnnnnnnnnnnnnnnnnnnnnnnnnnnnnnnnnnnnnnnnnnnnnnnnnnnnnnnnnnnnnnnnnnnnnnnnnnnnnnnnnnnnnnnnnnnnnnnnnnnnnnnnnnnnnnnnnnnnnnnnnnnnnnnnnnnnnnnnnnnnnnnnnnnnnnnnnnnnnnnnnnnnnnnnnnnnnnnnnnnnnnnnnnnnnnnnnnnnnnnnnnnnnnnnnnnnnnnnnnnnnnnnnnnnnnnnnnnnnnnnnnnnnnnnnnnnnnnnnnnnnnnnnnnnnnnnnnnnnnnnnnnnnnnnnnnnnnnnnnnnnnnnnnnnnnnnnnnnnnnnnnnnnnnnnnnnnnnnnnnnnnnnnnnnnnnnnnnnnnnnnnnnnnnnnnnnnnnnnnnnnnnnnnnnnnnnnnnnnnnnnnnnnnnnnnnnnnnnnnnnnnnnnnnnnnnnnnnnnnnnnnnnnnnnnnnnnnnnnnnnnnnnnnnnnnnnnnnnnnnnnnnnnnnnnnnnnnnnnnnnnnnnnnnnnnnnnnnnnnnnnnnnnnnnnacgattcagtttttagtccccacggaattctactcgcaagatacagctgcacgcacctggaacgaccacggtcgggcatggcgcatcactgaccagcgccttgcagcccgagccgaagccctcttccaccgccatgcacgaggcgtccgacgcgcaccagacgcactcgtccgacgcggcgcaggtgccgcagtcggtgatggtgtcgcactgcgggttgacggggcaagcctcggcctccgggatccagtcgctgcaccaaacctggtagcggtcgaacggtccctgcaggttgccggccacgcacgtgagtgtggactggcagaaaccgcacgacggctcggcggcacagtcgtagcaccggtccatggcctgccagaattgcgtgtccgggggcggcgacagcgccgagcagttgaccaccgacacgtggccgtcctcccgcacccacgacttggccgtcggcgccgacgacacctgcagcgcgcgcagactccacacgcccagcagggtcgccagcaccgcgcccgcccgcaagctgccgctccacttggctcctccgccgccgccacggctgctgctctctccttgatcttggttgttacttgttgctctccacatgcttgctcgttactactactttctcgactgaaatgcactacttttttataggtttttactgtttctcttcctgttttatgggggtttgtttttatttaaagaaaaatgaaagaaaagacgaatacgaagatgaagtccacggacccagacccttccggctacagccagatagcggaagagaggggtcgcgccaacctcgcgtcagtcacacacacgcaatacagtcactcaactcactcgcgcgctcccggggaaggcgggcggtctctttgtcgcccaagacgagctctccgctcgcaagaggaggcccgcccggacacgctcgcgccgtctgctgcgtgttcgctgcggcgcgtgtcctgtgctctgctcggttctcgtgtgtgttgtgtccctgtcctgtgctcgctgctgctgctgtcggtcgctgtcttcctcgtcgctcgcgcgctggtcgctgaaaacgaagaatgggcggggggtcgctcccgtcggggccactggccaatacaaacgccaagtacgagccaaagatcgcccggtccgagcaggtcaactgcgcatgacacgcttcctgcgttgaaaatatggaaagaattggaaagtcaatctcggtcgccaacctaccggagtgcataacctttcggagcactaactggtcttgtaccggccccagcaagatgtactatactccgctacccattgtgaacctatacccctcgcagatcgttgcaattctgagcagctgattgctcagtcgctaaggcactgttgcatcgcatatttggggtgaagggtcatacctcaatttcagtcaccattccaatcccgagagtaacaacctgtcacactccataccctgcgtcgccgcgataggtcagtccgctcatcaccccgagttcatgtctgccacatcaagcgccttcggctggcctggacacggtgctggtacggatgcttggtgctgccacctaagccgccaccccagcccgcaggcaccacctgcagtccttggtgagcacgcgctgcgccctcctcatactgtactgggcagggtttgcacgcgagtcgcagtcgagttgtcgccgcgcaagagacactgcgagccaagttgaagtcgggcactgattgcattagtctgaaggaaagcgagtttggcagtcgaccgacacggctgcgttgccgaccgacacggctgcgttgcagagctccaggaccggtgtccttgccgtttatttaacgaccgtgtcaacacaagggccggccgttaccggcgcggttacttcgcggggggtattgccgattccctgccgacgagtcgagcgtctcggcaattgcggtgcatgtaccggcaagaccgacacggtctttgccgctcggggctcggtggtgagacttgagtcggtcgtagcccaaactcacgcccctggtgggcacacttgcttacgacggtggcagcccgagactacgcggcactgaaaagctatggttttatttatttttgtagaatgccctaccttttactagtactaaaagttagtgtagagcggggtagaggtagtcgttggtgagcgaggcccacttgcagccatccttttggacggcgcgccagcagctgtgcgtgatgttggcgatctcgtggatgaagaggccgccgcgctcgtccagtgtcttgagcccgaacgtgtccgacgtgtactcgagcgtgtcgttcatgttgacgatggtgaggttcatgtacttggtcttgatctcctcgatcgtgtccacctccgagtagcggccaaagatggagctctgccacggcatgatgcgctcgtcggcgggcgaggcgaagaagtgggcctcctccagcttgaggaagttggccttgcggcggcgctggtcgtaaacgcactggtcgtcgcccggcagacagcggttaacgttgttgtacacgggcaggaagaagttggcggtggagaagctgccgaactgcggccagcggttgacgttgaactgcgagtacgtgtactgcgcgtcggggttctcgatggtgtagatgacgtagtccttctgcatcttgccgtagtagtcctccgggccgtaggcgctgtagttgaacatggtctcgggcacgagcgtggcgaggaacggcccatcattggcaatcgagtactccaccttgtcggggccgatgaactggccgttctggaggccggctatgctgatgtagcgcttgaccttgtggtcgtccatctcttcgatgactgcgcgagcgatggcaccgccctgcgagtgggcgaggaagatgtagccgttgtcgaactcggagctattggcgacgatctcacggatctgagcgacagccttcgggacctgcaggacgatcgcctctagcgagcagggcatctcgcaggtgagaggtacaacggtacgcccctccgccgtgaggttggccacgaaatagtgaaaaataatgaaggaaatgtgagctgctgaccgcgagcgcggcggcgggctcttagcatgctttgtcgtaaaagttgtcgtacacttacgggtacaacatagttaagggggttggttgctctttgcctgaaagtttggtgcatggaaccaataaatggtcgcttgcctcgcttgtctgcagtcctttgcctcacgtagcctattgtgccgcgcaggtacgtcacccatgtcggctgcactgaacattcctttacttgctcgttaggttcttggttactacggctggcccaagctaagcatctctgtccacctcagcgatgttaccagctaactatttcgaaaacccacgacccaagcgcgccaacggtagcccgttacacttccatcgctgcaagaaaggctctgcagggtgtgcctgcagacttcttttacagagcggtccacaccaaaatcgcctaaggcaatggaatccgtgcgaccattcatcatctctgagtgaccattcatcatctctgagtaatgaacgaatgtagaggctgtcgggtgtgcagtgctaagcgacaacttttacgacaaagcatgctaagagcccgccgccgcgctcgcggtcagcagctcacatttccttcattatttttcactatttcgtggccaacctcacggccgaggggcgtaccgttgtacctctcacctgcgagatgccctgctcgctagaggcgatcgtcctgcaggtcccgaaggctgtcgctcagatccgtgagatcgtcgccaacagctccgagttcgacaacggctacatcttcctcgcccactcgcagggcggtgccatcgctcgcgcagtcatcgaagagatggacgaccacaaggtcaagcgctacatcagcatagccggcctccagaacggccagttcatcggccccgacaaggtggagtactcgattgccaatgatgggccgttcctcgccacgctcgtgcccgagaccatgttcaactacagcgcctacggcccggaggactactacggcaagatgcagaaggactacgtcatctacaccatcgagaaccccgacgcgcagtacacgtactcgcagttcaacgtcaaccgctggccgcagttcggcagcttctccaccgccaacttcttcctgcccgtgtacaacaacgttaaccgctgtctgccgggcgacgaccagtgcgtttacgaccagcgccgccgcaaggccaacttcctcaagctggaggaggcccacttcttcgcctcgcccgccgacgagcgcatcatgccgtggcagagctccatctttggccgctactcggaggtggacacgatcgaggagatcgagaccaagtacatgaacctcaccatcgtcaacatgaacgacacgctcgagtacacgtcggacacgttcgggctcaagacactggacgagcgcggcggcctcttcatccacgagatcgccaacatcacgcacagctgctggcgcgccgtccaaaaggatggctgcaagtgggcctcgctcaccaacgactacctctaccccgctctacactaacttttagtactagtaaaaggtagggcattctacaaaaataaataaaaccatagcttttcagtgccgcgtagtctcgggctgccaccgtcgtaagcaagtgtgcccaccaggggcgtgagtttgggctacgaccgactcaagtctcaccaccgagccccgagcggcaaagaccgtgtcggtcttgccggnnnnnnnnnnnnnnnnnnnnnnnnnnnnnnnnnnnnnnnnnnnnnnnnnnnnnnnnnnnnnnnnnnnnnnnnnnnnnnnnnnnnnnnnnnnnnnnnnnnnnnnnnnnnnnnnnnnnnnnnnnnnnnnnnnnnnnnnnnnnnnnnnnnnnnnnnnnnnnnnnnnnnnnnnnnnnnnnnnnnnnnnnnnnnnnnnnnnnnnnnnnnnnnnnnnnnnnnnnnnnnnnnnnnnnnnnnnnnnnnnnnnnnnnnnnnnnnnnnnnnnnnnnnnnnnnnnnnnnnnnnnnnnnnnnnnnnnnnnnnnnnnnnnnnnnnnnnnnnnnnnnnnnnnnnnnnnnnnnnnnnnnnnnnnnnnnnnnnnnnnnnnnnnnnnnnnnnnnnnnnnnnnnnnnnnnnnnnnnnnnnnnnnnnnnnnnnnnnnnnnnnnnnnnnnnnnnnnnnnnnnnnnnnnnnnnnnnnnnnnnnnnnnnnnnnnnnnnnnnnnnnnnnnnnnnnnnnnnnnnnnnnnnnnnnnnnnnnnnnnnnnnnnnnnnnnnnnnnnnnnnnnnnnnncacctcgacggacctgcacttgcgtctccagacccgcttccaatgcggacagacccgctagacacgctgctagcgctgctgcgcacgtcgacggcgccactcgagccaccggacacgacgctcgttgaaacaatcacgccgccactgctctcggcaccgccgccgctcgtcagcaacaccgagccgcccactgtcgccgcggacgacccgccgtcgatcgacacgtcgccacccgcgccttgagcgttcgctgatccgacaatcctcaccgtctgcgccgcggtcgcgctgtccacgctgccgccacgcaactccacatcgccgccgacagcactgctgtcgccctggacgaggctcaggctgccgccagaaccgctacggacgaacacaccgctgccaccagcggagctgccagaggcgccactcgacacagtcacgtccccaccgatgccgctagaagacgacccgccggaaacgctaaccgcgccgccagatccactggatgaggaagttccgccgctcacgtccacggaaccggacaaacccatctgcgaatcgccgccagtcacgagaacacttcctcccgactctgccgtgccgctggaaccgcccgccacgctcagcaaaccaccggaccccgttgtactagatccgctggccacattaacagcaccagatgcgccgtccaccgcagagccagacacgaccgacacaccaccagacgcagacgtaccgctagcaatgccgcttccgaccgacacaacgccgctcgagacactgccagtgccgctagacaccgacaccgcgccgcccgtcgacgaactgctagaaccgcccgacacaaacacactgcctgctgtggtagacgcctcgccagactgcacggacacgtcgccgctgctacccgaccccgaagaaccggaagacagcgtcaccacgcccgacgctgcatccaccgacgcgccgctcccgatcgtcgcagaaccgctcaagacgtctccgctcgcagaagcaccgctcgtcacgctcacgtcgccgctgcccagcaaacccgcacccgaagcaatgtccacgacaccacctgcgccagcatcgcttgcgccgccggccagaacgatgccgcctccggtcgcagcgctagacgaaccgacaccgccagttaaggcgacgcctccagcaacaccagatgacgccgtcagagatccgccgcgcacactcaccgagccgccacccgtagtgctatccgtactatcgccggcaacaacttcgaccgtgccgccggcagcactgcgacgaacaccgctcgacaagctcaccgcgccgtcctcgccggacgacacgaacacagagcccccgcgcgcgctcgtgcttccagtcggcccgccgcgaatctgcacgctgcctgcgtccgacgagtctgaaacaccgctcgacacgaccacagacccgctcgacccgctcgcgctgccgccagacgcaactgacaacaatcccgacgcgccggagtcggcatcgccagtgctgacgcccacgtcaccgctcacgctcgagcctgtggcagccgcgctcgacaccgtaacgacgccgctgctcgcactggccgcgccgctcaacagcgataccgcgccaccagctgacgaaccactgctgcttccgccgagcaccgacacagagccgccgctcgccgcgtcgctcgagccgccagccaccgtcacggagcccgagtcgctcccggtcgaagctccgctgcccagcgtcacatcgccggacaagcctcccgtggtagcgccactactcacctcgacggacccactggctccgctcgcaccaggagcggatgaccccaggatcgcgtcaccgctgatggcagctgcgtcactgccactaccgctcagcacggacaccgagccgccctccacgacaccggtaccgcccgacacgaatgcatggccgccggcactgtctccggcagagctgccgccctccagccgaacggcgccagccacgactccagtcgaagacgctgtcgacagtgacgagccgcccaccaacacaacatcgcctgccgcagcttgatcgctcgaaccgccgcgcacgtccacggcgccgccgtcaacgacagacgaccccaccgacacgctaatgctgccagcagagtccgtactgccggacccagatgccgagccggacgaaatccgtacaccgcccgacgctgcgccggatgcgctagccagtcgcgcctcgccgctgctgcttgggccttctccgctgagcaacgccagcgacgcgccgttgcccgacgcgcttgcgccgccagacaccgtcacgtcaccgcccgtcgcgccagcaccaccggccaaacccaacgagccgcccaagtcgcccgaactgataccgccggacacgctaaccgacccgccagcacctgcagcctcgccgccagacacgctcactgacccgctcgactgcgtcgacgacgcaccagatccgatcgacacagcgcctgacgaaccggcctcgaccgacccactcgtcaacgacaccgcgccactgctcacggaagccgcaccgctgcccgacccgagcgtcactgcgccgctcaccgtcgaagcactttcaccgctcaggatcgtcacgctgccgcccgccgacgaatccgacgcgccgcccaacacagatacgctggagccctcacccgtagcggacgagccaccagccacctcgacggaccctgcactagcgtctccagacccgcttccaatgcggacagacccgctagacacgctgctagcgctgctgcgcacgtcgacggcgccactcgagccaccggacacgacgctcgttgaaacaatcacgccgccactgctctcggcaccgccgccgctcgtcagcaacaccgagccgcccactgtcgccgcggacgacccgccgtcgatcgacacgtcgccacccgcgccttgagcgttcgctgatccgacaatcctcaccgtctgcgccgcggtcgcgctgtccacgctgccgccacgcaactccacatcgccgccgacagcaccactgtcgccctggacgaggctcaggctgccgccagaaccgctacggacgaacacaccgctgccaccagcggagctgccagaggcgccactcgacacagtcacgtccccaccgatgccgctagaagacgacccgccggaaacgctaaccgcgccgccagatccactggatgaggaagttccgccgctcacgtccacggaaccggacgaacccgtctccgaatcgccgccagtcacgagaacacttcctcccgactctgccgcgccgctggaaccgcccgccacgctcagcaaaccaccggaccccgtactactagatccgctggccacattaacagcaccagatgcgccgtccaccgcagagccagacacgaccgacacaccaccagacgcagacgtaccgctagcaatgccgcttccgaccgacacaacgccgctcgagacactgccagtgccgctagacaccgacaccgcgccgcccgtcgacgagctgctagaaccgcccgacacaaacacactgcctgctgtggtagacgcctcgccagactgcacggacacgtcgccgctgctacccgaccccgaagaaccggaagacagcgtcaccacgcccgacgctgcatccaccgacgcgccgctcccgatcgtcgcagaaccgctcaatgcgtctccgctcgcagaagcaccgctcgtcacgctcacgtcgccgctgcccagcaaacccgcacccgaagcaatgtccacgacaccccctgcgccagcatcgcttgcgccgccggccagaacgatgccgcctccggtcgcagcgctagacgaaccgacaccgccagttaaggcgacgcctccagcaacaccagatgacgccgtcagagatccgccgcgcacactcaccgagccgccacccgtagtgctatccgtactatcgccggcaacaacttcgaccgtgccgccggcagcactgcgacgaacaccgctcgacaagctcaccgcgccgtcctcgccggacgacacgaacacagagcccccgcgcgcgctcgtgcttccagtcgccccgccgcgaatctgcacgctgcctgcgtccgacgagtctgaaacaccgctcgacacgaccacagacccgctcgacccgctcgcgctgccgccagacgcaactgacaacaatcccgacgcgccggagtcggcatcgccagtgctgacgcccacgtcaccgctcacgctcgagcctgtggcagccgcgctcgacaccgtaacgacgccgctgctcgcactggccgcgccactcaacagcgataccgcgccaccagctgacgagccgctgctgcttccgccgagcaccgacacagagccgccgctcaccgcgtcgctcgagccgccagccaccgtcacggagcccgagtcgctcccggtcgaagctccgctgcccagcgtcacatcgccggacacgcctcccgtggtagcgccactactcacctcgacggacccactggctccgctcgcaccaggagcggatgaccccaggatcgcgtcaccgctgatggcagctgcgtcactgccgctaccgctcagcacggacaccgagccgccctccacgacaccggtaccgcccgacacgannnnnnnnnnnnnnnnnnnnnnnnnnnnnnnnnnnnnnnnnnnnnnnnnnnnnnnnnnnnnnnnnnnnnnnnnnnnnnnnnnnnnnnnnnnnnnnnnnnnnnnnnnnnnnnnnnnnnnnncagcaaaccaccggaccccgtactactagatccgctggccacattaacagcaccagatgcgccgtccaccgcagagccagacacgaccgacacaccaccagacgcagacgtaccgctagcaatgccgcttccgaccgacacaacgccgctcgagacactgccagtgccgctagacaccgacaccgcgccgcccgtcgacgagctgctagaaccgcccgacacaaacacactgcctgctgtggtagacgcctcgccagactgcacggacacgtcgccgctgctacccgaccccgaagaaccggaagacagcgtcaccacgcccgacgctgcatccaccgacgcgccgctcccgatcgtcgcagaaccgctcaatgcgtctccgctcgcagaagcaccgctcgtcacgctcacgtcgccgctgcccagcaaacccgcacccgaagcaatgtccacgacaccccctgcgccagcatcgcttgcgccgccggccagaacgatgccgcctccggtcgcagcgctagacgaaccgacaccgccagttaaggcgacgcctccagcaacaccagatgacgccgtcagagatccgccgcgcacactcaccgagccgccacccgtagtgctatccgtactatcgccggcaacaacttcgaccgtgccgccggcagcactgcgacgaacaccgctcgacaagctcaccgcgccgtcctcgccggacgacacgaacacagagcccccgcgcgcgctcgtgcttccagtcggcccgccgcgaatctgcacgctgcctgcgtccgacgagtctgaaacaccgctcgacacgaccacagacccgctcgacccgctcgcgctgccgccagacgcaactgacaacaatcccgacgcgccggagtcggcatcgccagtgctgacgcccacgtcaccgctcacgctcgagcctgtggcagccgcgctcgacaccgtaacgacgccgctgctcgcactggccgcgccgctcaacagcgataccgcgccaccagctgacgaaccgctgctgcttccgccgagcaccgacacagagccgccgctcgccgcgtcgctcgagccgccagccaccgtcacggagcccgagtcgctcccggtcgaagctccgctgcccagcgtcacatcgccggacaagcctcccgtggtagcgccactactcacctcgacggacccactggctccgctcgcaccaggagcggatgaccccaggatcgcgtcaccgctgatggcagctgcgtcactgccactaccgctcagcacggacaccgagccgccctccacgacaccggtaccgcccgacacgaatgcatggccgccggcactgtctccggcagagctgccgccctccagccgaacggcgccagccacgactccagtcgaagacgctgtcgacagtgacgagccgcccaccaacacaacatcgcctgccgcagcttgatcgctcgaaccgccgcgcacgtccacggcgccgccgtcaacgacagacgaccccaccgacacgctaatgctgccagcagagtccgtactgccggacccagatgccgagccggacgaaatccgtacaccgcccgacgctgcgccggatgcgctagccagtcgcgcctcgccgctgctgcttggaccttctccgctgagcaacgccagcgacgcgccgttgcccgacgcgcttgcgccgccagacaccgtcacgtcaccgcccgtcgcgccagcaccaccggccaaacccaacgagccgcccaagtcgcccgaactgataccgccggacacgctaaccgacccgccagcacctgcagcctcgccgccagacacgctcaccgacccgctcgactgcgtcgacgacgcaccagatccgatcgacactgcgcctgacgaactggtctcgaccgacccactcgtcaacgacaccgcgccactgctcacggaagccgcaccgctgcccgacccgagcgtcactgcgccgctcaacctcgaagcactttcaccgctcaggatcgtcacgctgccgcccgccgacgaatccgacgcgccgcccaacacagatacgctggagccctcacccgtagcggacgagccaccatccacctcgacggaccctgcactagcatctccagacccgcttccaatgcggacagacccgctagacacgctgctagcgctgctgcgcacgtcgacggcgccactcgagccaccggacacgacgctcgttgaaacaatcacgccgccactgctctcggcaccgccgccgctcgtcagcaacaccgagccgcccacactcgccgcggacgacccgccgtcgatcgacacgtcgccacccgcgccttgagcgttcgctgatccgacaatcctcaccgtctgcgccgcggtcgcgctgtccacgctgccgccacgcaactccacatcgccgccgacagcaccactgtcgccctggacgaggctcaggctgccgccagaaccgctacggacgaacacaccgctgccaccagcggagctgccagaggcgccactcgacacagtcacgtccccaccgatgccgctagaagacgacccgccggaaacgctaaccgcgccgccagatccactggatgaggaagttccgccgctcacgtccacggaaccggacgaacccgtctccgaatcgccgccagtcacgagaacacttcctcccgaccctgccgcgccgctggaaccgcccgccacgctcagcaaaccaccggaccccgttgtactagatccgctggccacattaacagcaccagatgcgccgtccaccgcagagccagacacgaccgacacaccaccagacgcagacgtaccgctagcaatgccgcttccgaccgacacaacgccgctcgagacactgccagtgccgctagacaccgacaccgcgccgcccgtcgacgaactgctagaaccgcccgacacaaacacactgcctgctgtggtagacgcctcgccagactgcacggacacgtcgccgctgctacccgaccccgaagaaccggaagacagcgtcaccacgcccgacgctgcatccaccgacgcgccgctcccgatcgtcgcagaaccgctcaatgcgtctccgctcgcagaagcaccgctcgtcacgctcacgtcgccgctgcccagcaaacccgcacccgaagcaatgtccacgacaccccctgcgccagcatcgcttgcgccgccggccagaacgatgccgcctccggtcgcagcgctagacgaaccgacaccgccagttaaggcgacgcctccagcaacaccagatgacgccgtcagagatccgccgcgcacactcaccgagccgccacccgtagtgctatccgtactatcgccggcaacaacttcgaccgtgccgccggcagcactgcgacgaacaccgctcgacaagctcaccgcgccgtcctcgccggacgacacgaacacagagcccccgcgcgcgctcgtgcttccagtcgccccgccgcgaatctgcacgctgcctgcgtccgacgagtctgaaacaccgctcgacacgaccacagacccgctcgacccgctcgcgctgccgccagacgcaactgacaacaatcccgacgcgccggagtcggcatcgccagtgctgacgcccacgtcaccgctcacgctcgagcctgtggcagccgcgctcgacaccgtaacgacgccgctgctcgcactggccgcgccgctcaacagcgataccgcgccaccagctgacgagccgctgctgcttccgccgagcaccgacacagagccgccgctcaccgcgtcgctcgagccgccagccaccgtcacggagcccgagtcgctcccggtcgaagctccgctgcccagcgtcacatcgccggacacgcctcccgtggtagcgccactactcacctcgacggacccactggctccgctcgcaccaggagcggatgaccccaggatcgcgtcaccgctgatggcagctgcgtcactgccgctaccgctcagcacggacaccgagccgccctccacgacgccggtaccgcccgacacgaatgcatggccgccggcactgtctccggcagagctgccgccctccagccgaacggcgccagccacgactccagtcgaagacgctgtcgacagtgacgagccgcccaccaacacaacatcgcctgccgcagcttgatcgctcgaaccgccgcgcacgtccacggcgccgccgtcaacgacagacgaccccaccgacacgctaatgctgccagcagagtccgtactgccggacccagatgccgagccggacgaaatccgtacaccgcccgacgctgcgccggatgcgctagccagtcgcgcctcgccgctgctgcttggaccttctccgntgagcaacgccagcgacgcgccgttgcccgacgcgcttgcgccgccagacaccgtcacgtcaccgcccgtcgcgccagcaccaccggccaaacccaacgagccgcccaagtcgcccgaactgataccgccggacacgctaaccgacccgccagcacctgcagcctcgccgccagacacgctcactgacccgctcgactgcgtcgacgacgcaccagatccgatcgacacagcgcctgacgaaccggcctcgaccgacccactcgtcaacgacaccgcgccactgctcacggaagccgcaccgctgcccgacccgagcgtcactgcgccgctcaccgtcgaagcactttcaccgctcaggatcgtcacgctgccgcccgccgacgaatccgacgcgccgcccaacacagatacgctggagccctcacccgtagcggacgagccaccagccacctcgacggaccctgcacttgcgtctccagacccgcttccaatgcggacagacccgctagacacgctgctagcgctgctgcgcacgtcgacggcgccactcgagccaccggacacgacgctcgttgaaacaatcacgccgccactgctctcggcaccgccgccgctcgtcagcaacaccgagccgcccactgtcgccgcggacgacccgccgtcgatcgacacgtcgccacccgcgccttgagcgttcgctgatccgacaatcctcaccgtctgcgccgcggtcgcgctgtccacgctgccgccacgcaactccacatcgccgccgacagcaccactgtcgccctggacgaggctcaggctgccgccagaaccgctacggacgaacacaccgctgccaccagcggagctgccagaggcgccactcgacacagtcacgtccccaccgatgccgctagaagacgacccgccggaaacgctaaccgcgccgccagatccactggatgaggaagttccgccgctcacgtccacggaaccggacgaacccgtctccgaatcgccgccagtcacgagaacacttcctcccgaccctgccgcgccgctggaaccgcccgccacgctcagcaaaccaccggaccccgttgtactagatccgctggccacattaacagcaccagatgcgccgtccaccgcagagccagacacgaccgacacaccaccagacgcagacgtaccgctagcaatgccgcttccgaccgacacaacgccgctcgagacactgccagtgccgctagacaccgacaccgcgccgcccgtcgacgagctgctagaaccgcccgacacaaacacactgcctgctgtggtagacgcctcgccagactgcacggacacgtcgccgctgctacccgaccccgaagaaccggaagacagcgtcaccacgcccgacgctgcatccaccgacgcgccgctcccgatcgtcgcagaaccgctcaatgcgtctccgctcgcagaagcaccgctcgtcacgctcacgtcgccgctgcccagcaaacccgcacccgaagcaacgtccacgacaccgccagcgccagcctcgctcgcaccgccggccagaacgatgccgcctccggtcgcagcgctagacgaaccgacaccgccagttaaggcgacgcctccagcaacaccagatgacgccgtcagagatccgccgcgcacactcaccgagccgccacccgtagtgctatccgtactatcgccggcaacaacttcgaccgtgccgccggcagcactgcgacgaacaccgctcgacaagctcaccgcgccgtcctcgccggacgacacgaacacagagcccccgcgcgcgctcgtgcttccagtcggcccgccgcgaatctgcacgctgcctgcgtccgacgagtctgaaacaccgctcgacacgaccacagacccgctcgacccgctcgcgctgccgccagacgcaactgacaacaatcccgacgcgccggagtcggcatcgccagtgctgacgcccacgtcaccgctcacgctcgagcctgtggcagccgcgctcgacaccgtaacgacgccgctgctcgcactggccgcgccgctcaacagcgataccgcgccaccagctgacgaaccgctgctgcttccgccgagcaccgacacagagccgccgctcgccgcgtcgctcgagccgccagccaccgtcacggagcccgagtcgctcccggtcgaagctccgctgcccagcgtcacatcgccggacaagcctcccgtggtagcgccactactcacctcgacggacccactggctccgctcgcaccaggagcggatgaccccaggatcgcgtcaccgctgatggcagctgcgtcactgccactaccgctcagcacggacaccgagccgccctccacgacaccggtaccgcccgacacgaatgcatggccgccggcactgtctccggcagagctgccgccctccagccgaacggcgccagccacgactccagtcgaagacgctgtcgacagtgacgagccgcccaccaacacaacatcgcctgccgcagcttgatcgctcgaaccgccgcgcacgtccacggcgccgccgtcaacgacagacgaccccaccgacacgctaatgctgccagcagagtccgtactgccggacccagatgccgagccggacgaaatccgtacaccgcccgacgctgcgccggatgcgctagccagtcgcgcctcgccgctgctgcttggaccttctccgctgagcaacgccagcgacgcgccgttgcccgacgcgcttgcgccgccagacaccgtcacgtcaccgcccgtcgcgccagcaccaccggccaaacccaacgagccgcccaagtcgcccgaactgataccgccggacacgctaaccgacccgccagcacctgcagcctcgccgccagacacgctcactgacccgctcgactgcgtcgacgacgcaccagatccgatcgacacagcgcctgacgaaccggcctcgaccgacccactcgtcaacgacaccgcgccactgctcacggaagccgcaccgctgcccgacccgagcgtcactgcgccgctcaccgtcgaagcactttcaccgctcaggatcgtcacgctgccgcccgccgacgaatccgacgcgccgcccaacacagatacgctggagccctcacccgtagcggacgagccaccagccacctcgacggaccctgcactagcatctccagacccgcttccaatgcggacagacccgctagacacgctgctagcgctgctgcgcacgtcgacggcgccactcgagccaccggacacgacgctcgtagaaacaatcacgccgccactactcacggcgccgccgccgctcgtcagcaacaccgagccgcccactgtcgccgcggacgacccgccgtcgatcgacacgtcgccacccgcgccttgagcgttcgctgatccgacaatcctcaccgtctgcgccgcggtcgcgctgtccacgctgccgccacgcaactccacatcgccgccgacagcaccactgtcgccctgaacgaggctcaggctgccgccagaaccgctacggacgaacacaccgctgccaccagcggagctgccagaggcgccactcgacacagtcacgtccccaccgatgccgctagaagacgacccgccggaaacgctaaccgcgccgccagatccactggatgaggaagttccgccgctcacgtccacggaaccggacaaacctgtcagcgaactgccgccgttcacgagaacacttcctcccgaccccgccgcgccgctggaaccgcccgccacgctcagcaaaccaccggaccccgttgtactagatccgctggccacacgcacagcaccggatgcgccgtccaccgcagaaccagacacgaccgacacagcgccagatgcagacgcaccgctagcaatgccgctccgaccgacannnnnnnnnnnnnnnnnnnnnnnnnnnnnnnnnnnnnnnnnnnnnnnnnnnnnnnnnnnnnnnnnnnnnnnnnnnnnnnnnnnnnnnnnnnnnnnnnnnnnnnnnnnnnnnnnnnnnnnnnnnnnnnnnnnnnnnnnnnnnnnnnnnnnnnnnnnnnnnnnnnnnnnnnnnnnnnnnnnnnnnnnnnnnnnnnnnnnnnnnnnnnnnnnnnnnnnnnnnnnnnnnnnnnnnnnnnnnnnnnnnnnnnnnnnnnnnnnnnnnnnnnnnnnnnnnnnnnnnnnnnnnnnnnnncctccaacgagattaattgatccagccaccattgactttcctttgcccactacgtcgccgccagctacagaaacattcccgccagcagtggtgttgcttgtaccgcccaacacagttacttggccaccatccaaaacagaatcacgaccatgaatcagcacgccaccggagtttgaaaggctgcttcgaccaccaccgacacgaacggaaccgcctgccgaggtcttcgaaaaaccgccgtcgatcgacacatcgccacccgcgccttgagcgttcgctgatccgacaatcctcaccgtctgcgccgcggtcgcgctgttcacgctgccgccacgcaactccacatcgccgccgacagcaccactgtcgccctgaacgaggctcaggctgccgccagaaccgctacggacgaacacaccgctgccaccagcggagctgccagaggcgccactcgacacagtcacgtccccaccgatgccgctagaagacgacccgccggaaacactaaccgcgccgccagatccactggatgaggaagttccgccgctcacgtccacggaaccggacaaacctgtcagcgaactgccgccgttcacgagaacacttcctcccgaccccgccgcgccgctggaaccgcccgccacgctcagcaaaccaccggaccccgttgtactagatccgctggccacacgcacagcaccggatgcgccgtccaccgcagaaccagacacgaccgacacagcgccagatgcagacgcaccgctagcaatgccgcttccgaccgacacaacgccgctcgagacactgccagtgccgctagacaacgacaccgcgccgcccgtcgacgagctgctagagccacctgacacagacacggtgcctgccgctgtagccgcattgccagttcgtagcgacatgtcaccgctgctggccgtcgaggatgaccccgtaaagactgtcgtgttcccggttgtcgacgtgagtgatcgtccacttccgattgacgccgctccgcttgatcccattacacccgatgtgcccccggttgcactaaccacttgaatagctccactctggttcagacccacgcctgatgtgacttgcacggagccaccagagcgactcgtgctcgccccacccatcactgtgatcgctccgccgtcactgttgtcacgtgatgaagcaagcgcgctaccaccttggacgaagacgttaccaccaacaccagaacgtccggatagagaacccgcagaaatgttcacatttccgcctgaactcatcgttgacgtgaccccgacttgaatgttcacatcacccgacgcggatgaagcacggcctactgtcgtaatgttaaccatgccgttggctgctgcattaagtgaaatggatccgccaccggaagaatacgcgtctgcattcgctcctgcgacaagacggatatctccttgagaccccttcgaatcgcctgtagacagatacaaagagcccgattgtccgagctcactgcttccggtggagaactgtagcgaaccactggagccttgcttgacttggccgctggatagggaaacgagcccacttccagaacgcgatgcggaagcttgactggaaatgctgatctcgccgctctgaccaatgccattgacgccgctttgaacagaaatgctgccaccagtcccgctaaacgaactgctaccggcaccgatgacaacgtcaccaccatttgccttggtactggtcccagcctgcaagaagacagacccagatctcgaagtcgagctcccagatctaacaaaaatatcgccagactgcccagccgacgcactccctgtttcgatacggacaagtccgctctggacaccttctccagaagacagttgtacacttcctccaccgaccttcgatccagagccgccgagcacactgacagctccaccggtttcgccacctgcgccgccaatgacagagatggatcctccagttccgctcgttgccgacgttcctccaacgagattaattgatccagccaccattgactttcctttgcccactacgtcgccgccagctacagaaacattcccgccagcagtggtgttgcttgtaccgcccaacacagttacttggccaccatccaaaacagaatcacgaccatgaatcagcacgccaccggagtttgaaaggctgcttcgaccaccaccgacacgaacggaaccgcctgccgaggtcttcgaaaaaccgccgtcgatcgacacatcgccacccgcgccttgagcgttcgctgatccgacaatcctcaccgtctgcgccgcggtcgcgctgtccacgctgccgccacgcaactccacatcgccgccgacagcaccactgtcgccctgaacgaggctcaggctgccgccagaaccgctacggacgaacacaccgctgccaccagcggagctgccagaggcgccgctcgacacagtcacgtccccaccgatgccgctagaagacgacccgccggaaacgctaaccgcgccgccagatccactggatgaggaagttccgccgctcacgtccacggaaccggacgaacccgtctccgaatcgccgccagtcacgagaacacttcctcccgaccccgccgcgccgctggaaccgcccgccacgctcagcaaaccaccggaccccgttgtactagatccgctggccacattaacagcaccggatgcgccgtccaccgcagagccagacacgaccgacacaccaccagacgcagacgtaccgctagcaatgccgcttccgaccgacacaacgccgctcgagacactgccagtgggggatcctnnnnnnnnnnnnnnnnnnnnnnnnnnnnnnnnnnnnnnnnnnnnnnnnnnnnnnnnnnnnnnnnnnnnnnnnnnnnnnnnnnnnnnnnnnnnnnnnnnnncgccacggatatccacgtcgcctgcgtccgacgagacggaatcgccgctcgacacgaccacagacccgctcgacccgcttgcactggtgccagacgcaaccgacaacgagcccgatgcgccggagtcggcaccgcccgtgtgaacgcccacgtcgccactcatactcgagcccgtcgcggctgcgctcgccaccttgacgctgccactggtcgcaccgatgccactcaccagcgacaccgcgccgccagcagatgagtcgccactgcttccgccgcgcaccgacacagacccgccgctggacgcgacacttgacccgccaaccacgtccactgacccggacgagctgtcgagcgagtcgccactacccagcgtcacgttgccggacacgccactcgatgaagcgccgctcctcacattcacggacccgctggcaccagaaacagcagatgagcccaccgtcacgacaccgctggaggcagccgcgtcactgccgccgccgctcaccaacgatacggacccgccctgcaccacgccagaaccgcctgacacagacaccacgccgccggcgatgtttcctgcagagctgccgccctccaaccgaacggcgcctgctacggctcctgtcgaagacgatgtcgacagtgacgaaccgcccgtcaacacgacgccgcctgcagcggatgcggcgctcgaaccgctctgcacgaccacatcgccgccgtcagccgcggacggacccaccgacaagcggatgcttccagccgaaccagcgctgccagatccagacgcagagccggacgaaatccatacaccgcccgacgcagagcctgacgcactggccagacgcacatcgccgctgctgctcgggccttctccgctgagcaacgccagcgacgcgccgttgcccaacgtgctcacgccgccagacaccgtcacgtcaccgcccgtcgcgccagcaccaccggccaaagccaacgaaccacccacgtcgtccgagctgcgaccgccggacacgcgcaccgacccgctagcacctgcagcctcgccgccagatacgctcaccgacccgctcgactgcgtcgacgacgcaccagatccgatcgacactgcgcctgacgaaccggtctcgaccgacccactcgtcaacgacaccgcgccactgctcacggaagccgcaccgctgccagacccgagcgtcactgcgccgctcaccgtcgaaggactttcaccgctcaggatcgtcacgctgccgcccgccgacgaatccgacgcgccgcccaacacagacacgctggagccctcacccgtagcggacgagccaccagtcacctcgatggaccctgcactagcgtccccggacccgcttccaatgcggacggacccgcttgacacgctgctagcgctgctgcgcacgtcaacgctgccactcgaaccaccggacacgacgctcgtagaaacggtcacgccgccactgctcacggcgccgtcgccactcgtcagcaacaccgaaccgcccacactcgccgcagacgaaccgccatcgatcgacacgtcgccgcccgcgccctgagcgttcgcagatccgacgaccctcaccttctgcgctgcggtcgcgctgtccacgccgccgccacgcaactccacatcgctgccaacaacaccgctgtcgccctggacgaggctcaggctgccgccagaaccgctacggacgaacacaccgctgccaccagcggagctgccggagatgccgctcgacacagtcacgtccccgccgacgccgcttgaagacgaaccgcccgacacgcggacagcaccgccagacacactcgacgacgaagacccgccgctcacatccacggaaccggaagaccccgtcagcgaactgccgccgctcacgagaacacttcctcccgaccccgccgcgccgctggaaccgcccgccacgctcagcaaaccaccggaacccgtactactagatccgctggccacacgcacagcaccggatgcgccgtccaccgcagagccagacacgaccgacacagcgccagatgcagacccaccgctagcaatgccgcttccgaccgacacaacgccgctcgagacactgccagtgccgctagacaccgacaccgcgccgcccgtcgacgagctgctagaaccgcccgacacaaacacgctgcctgccgtggtagacgcctcgccagactgcacggacacgtcgccgctgctacccgaccccgaagaaccggaagacagcgtcaccacgcccgacgccgcatccaccgacgcgccgctcccgatcgtcgcagaaccgctcaagacgtctccgctcgcagaagcaccgctcgtcacgctcacgtcgccgctgcccagcaagcccgcgcccgaagaaacgtccacgacaccgccagcgccagcctcgctcgcaccgccagtcagagcaatgccgcctccggtcgcagcgccagacgaaccagcaccgccagacaaggccacaccgccagcaacacccgtagatgcagtcagagatccgccgcgcacgctcaccgaaccgccacccacactgctgtccgtactaccaccggcggtgacatccaccgagccgccggcagcactgcgacgaacaccaccagacaagctcaccacgccgtcctcgccggacgacacgtacacagagcccccgcgcgtgctcgtgcttccagtcgagccgccacggatatccacgtcgcctgcgtccgacgagacggaatcgccgctcgacacgaccacagacccgctcgacccgcttgcactggtgccagacgcaaccgacaacgagcccgatgcgccggagtcggcaccgcccgtgtgaacgcccacgtcgccactcatactcgagcccgtcgcggctgcgctcgccaccttgacgctgccactggtcgcaccgatgccactcaccagcgacaccgcgccgccagcagatgagtcgccactgcttccgccgcgcaccgacacagacccgccgctggacgcgacacttgacccgccaaccacgtccactgacccggacgagctgtcgagcgagtcgccactacccagcgtcacgttgccggacacgccactcgatgaagcgccgctcctcacattcacggacccgctggcaccagaaacagcagacgaacccaccgtcacgacaccgctggaggcagccgcgtcactgccgccgccgctcaccaacgatacggacccgccctgcaccacgccagaaccgcctgacacagacaccacgccgccggcgatgtttcctgcagagctgccgccctccaaccgaacggcgcctgctacggctcctgtcgaagacgatgtcgacagtgacgaaccgcccgtcaacacgacgccgcctgcagcggatgcggcgctcgaaccgctctgcacgaccacatcgccgccgtcagccgcggacggacccaccgacaagcggatgcttccagccgaaccagcgctgccagatccagacgcagaaccggacgaaatccatacaccgcccgacgcagagcctgacgcactggccagacgcacatcgccgctgctgctcgggccttctccgctgagcaacgccagcgacgcgccgttgcccaacgtgctcacgccgccagacaccgtcacgtcaccgcccgtcgcgccagcaccaccggccaaagccaacgaaccaccctcgtcgtccgagctgcgaccgccggacacgcgcaccgacccgctagcacctgcagcctcgccgccagatacgctcaccgacccgctcgactgcgtcgacgacgcaccagatccgattgacactgcgcctgacgaaccggtctcgaccgacccactcgtcaacgacaccgcgccactgctcacggaagccgcaccgctgccagacccgagcgtcactgcgccgctcaccgtcgaagcactttcaccgctcaggatcgtcacgctgccgcccgtcgacgaatccgacgcgccgcccaacacagacacgctggagccctcacccgtagcggacgagccaccagtcacctcgatggaccctgcactagcgtctccggacccgcttccaatgcggacggacccgcttgacacgctgctagcgctgctgcgcacgtcaacgctgccactcgaaccaccggacacgacgctcgtagaaacggtcacgccgccactgctcacggcgccgtcgccactcgtcagcaacaccgaaccgcccacactcgccgcagacgaaccgccatcgatcgacacgtcgccgcccgcgccctgagcgttcgcagatccgacgaccctcaccttctgcgctgcggtcgcgctgtccacgccgccgccacgcaactccacatcgctgccaacaacaccgctgtcgccctggacgaggctcaggctgccgccagaaccgctacggacgaacacaccgctgccaccagcggagctgccggagatgccgctcgacacagtcacgtccccgccgacgccgcttgaagacgaaccgcccgacacgcggacagcaccgccagatccactggatgaggaagttccgccgctcacgtccacggaaccggacgaacccgtctccgaatcgccgccagtcacgagaactcttcctcccgactctgccgcgccgctggaaccgcccgccacgctcagcaaaccaacggaacccgtactactagatccgctggccacacgaacagcaccggatgcgccgtccaccgcagcgccagacacaaccgacacagcgccagatgcagacgcaccgctagcaatgccgcttccgaccgacacaacgccgctcgagacactgccagtgccgctagacaccgacaccgcgccgcccgtcgacgagctgctagaaccgcccgacacaaacacgctgcctgccgtggtagacgcctcgccagactgcacggacacgtcgccgctgctacccgaccccgaagaaccggaagacagcgtcaccacgcccgacgccgcatccaccgacgcgccgctcccgatcgtcgcagaaccgctcaaggcgtctccgctcgcagaagcaccgctcgtcacgctcacgtcgccgctgcccagcaagcccgcgcccgaagaaacgtccacgacaccgccagcgccagcctcgctcgcaccgccagtcagagcaatgccgcctccggtcgcagcgccagacgaaccagcaccgccagacaaggccacaccgccagcagcacccgtagatgcagtcagagatccgccgcgcacgctcaccgaaccgccgcccacactgctgtccgtactaccaccggcggtgacatccaccgagccgccggcagcactgcgacgaacaccaccagacaagctcaccacgccgtcctcgccggacgacacgtacacagagcctccgcgcgtgctcgtgcttccagtcgagccgccacggatatccacgtcgcctgcgtccgacgagacggaatcgccgctcgacacgaccacagacccgctcgacccgcttgcactggtgccagacgcaaccgacaacgagcccgatgcgccggagtcggcaccgcccgtgtgaacgcccacgtcgccactcatactcgagcccgtcgcggctgcgctcgccaccttgacgctgccactggtcgcaccgatgccactcaccagcgacaccgcgccgccagcagatgagtcgccactgcttccgccgcgcaccgacacagacccgccgctggacgcgacacttgacccgccaaccacgtccactgacccggacgagctgtcgagcgagtcgccactacccagcgtcacgttgccggacacgccactcgatgaagcgccgctcctcacattcacggacccgctggcaccagaaacagcagatgagcccaccgtcacgacaccgctggaggcagccgcgtcactgccgccgccgctcaccaacgatacggacccgccctgcaccacgccagaaccgcctgacacagacaccacgccgccggcgatgtttcctgcagagctgccgccctccaaccgaacggcgcctgctacggctcctgtcgaagacgatgtcgacagtgacgaaccgcccgtcaacacgacgccgcctgcagcggatgcggcgctcgaaccgctctgcacgaccacatcgccgccgtcagccgcggacggacccaccgacaagcggatgcttccagccgaaccagcgctgccagatccagacgcagagccggacgaaatccatacaccgcccgacgcagagcctgacgcactggccagacgcacatcgccgctgctgctcgggccttctccgctgagcaacgccagcgacgcgccgttgcccaacgtgctcacgccgccagacaccgtcacgtcaccgcccgtcgcgccagcaccaccggccaaagccaacgaaccacccacgtcgtccgagctgcgaccgccggacacgcgcaccgacccgctagcacctgcagcctcgccgccagatacgctcaccgacccgctcgactgcgtcgacgacgcaccagatccgatcgacactgcacctgacgaaccggtctcgaccgacccactcgtcaacgacaccgcgccactgctcacggaagccgcaccgctgccagacccgagcgtcactgcgccgctcaccgtcgaagcactttcaccgctcaggatcgtcacgctgccgcccgccgacgaatccgacgcgccgcccaacacagacacgctggagccctcacccgtagcagacgagccaccagccacctcgatggaccctgcactagcgtctccggacccgcttccaatgcggacggacccgcttgacacgctgctagcgctgctgcgcacgtcaacgctgccactcgaaccaccggacacgacgctcgtagaaacggtcacgccgccactgctcacggcgccgccgccgctcgtcagcaacaccgaaccgcccacactcgccgcagacgaaccgccatcgatcgacacgtcgccgcccgcgccctgagcgttcgcagatccgacgaccctcaccttctgcgctgcggtcgcgctgtccacgccgccgccacgcaactccacatcgctgccaacaacaccgctgtcgccctggacgaggctcaggctgccgccagaaccgctacggacgaacacaccgctgccgccagcggagctgccggagatgccgctcgacacagtcacgtccccgccgacgccgcttgaagacgaaccgcccgacacgcggacagcaccgccagacacactcgacgacgaagacccgccgctcacatccacggaaccggaagaccccgtcagcgaactgccgccgctcacgagaacacttcctcccgaccccgccgcgccgctggaaccgcccgccacgctcagcaaaccaacggaacccgtactactagatccgctggccacacgaacagcaccggatgcgccgtccaccgcagagccagacacgaccgacacagcgccagatgcagacgcaccgctagcaatgccgcttccgaccgacacaacgccgctcgagacactgccagtgccgctagacaccgacaccgcgccgcccgtcgacgagctgctagaaccgcccgacacaaacacgctgcctgccgtggtagacgcctcgccagactgcacggacacgtcgccgctgctacccgaccccgaagaaccggaagacagcgtcaccacgcccgacgccgcatccaccgacgcgccgctcccgatcgtcgcagaaccgctcaagacgtctccgctcgcagaagcaccgctcgtcacgctcacgtcgccgctgcccagcaagcccgcgcccgaagaaacgtccacgacaccgccagcgccagcctcgctcgcaccgccagtcagagcaatgccgcctccggtcgcagcgccagacgaaccagcaccgccagacaaggccacaccgccagcaacacccgtagatgcagtcagagatccgccgcgcacgctcaccgaaccgccgcccacactgctgtccgtactaccaccggcggtgacatccaccgagccgccggcagcactgcgacgaacaccaccagacaagctcaccacgccgtcctcgccggacgacacgtacacagagcccccgcgcgtgctcgtgcttccagtcgagccgccacggatatccacgtcgcctgcgtccgacgagacggaatcgccgctcgacacgaccacagacccgctcgacccgcttgcactggtgccagacgcaaccgacaacgagcccgatgcgccggagtcggcaccgcccgtgtgaacgcccacgtcgccactcatactcgagcccgtcgcggctgcgctcgccaccttgacgctgccactggtcgcaccgatgccactcaccagcgacaccgcgccgccagcagatgagtcgccactgcttccgccgcgcaccgacacagacccgccgctggacgcgacacttgacccgccaaccacgtccactgacccggacgagctgtcgagcgagtcgccactacccagcgtcacgttgccggacacgccactcgatgaagcgccgctcctcacattcacggacccgctggcaccagaaacagcagacgaacccaccgtcacgacaccgctggaggcagccgcgtcactgccgccgccgctcaccaacgatacggacccgccctgcaccacgccagaaccgcctgacacagacaccacgccgccggcgatgtttcctgcagagctgccgccctccaaccgaacggcgcctgctacggctcctgtcgaagacgatgtcgacagtgacgaaccgcccgtcaacacgacgccgcctgcagcggatgcggcgctcgaaccgctctgcacgaccacatcgccgccgtcagccgcggacggacccaccgacaagcggatgcttccagccgaaccagcgctgccagatccagacgcagagccggacgaaatccatacaccgcccgacgcagagcctgacgcactggccagacgcacatcgccgctgctgctcgggccttctccgctgagcaacgccagcgacgcgccgttgcccaacgtgctcacgccgccagacaccgtcacgtcaccgcccgtcgcgccagcaccaccggccaaagccaacgagccacccacgtcgtccgagctgcgaccgccggacacgcgcaccgacccgctagcacctgcagcctcgccgccagatacgctcaccgacccgctcgactgcgtcgacgacgcaccagatccgatcgacactgcacctgacgaaccggtctcgaccgacccactcgtcaacgacaccgcgccactgctcacggaagccgcaccgctgccagacccgagcgtcactgcgccgctcaccgtcgaagcactttcaccgctcaggatcgtcacgctgccgcccgccgacgaatccgacgcgccgcccaacacagacacgctggagccctcacccgtagcagacgagccaccagccacctcgatggaccctgcactagcgtctccggacccgcttccaatgcggacggacccgcttgacacgctgctagcgctgctgcgcacgtcaacgctgccactcgaaccaccggacacgacgctcgtagaaacggtcacgccgccactgctcacggcgccgccgccgctcgtcagcaacaccgaaccgcccacactcgccgcagacgaaccgccatcgatcgacacgtcgccgcccgcgccctgagcgttcgcagatccgacgaccctcaccttctgcgctgcggtcgcgctgtccacgccgccgccacgcaactccacatcgctgccaacaacaccgctgtcgccctggacgaggctcaggctgccgccagaaccgctacggacgaacacaccgctgccgccagcggagctgccggagatgccgctcgacacagtcacgtccccgccgacgccgcttgaagacgaaccgcccgacacgcggacagcaccgccagacacactcgacgacgaagacccgccgctcacatccatggaaccggaagaccccgtcagcgaactgccgccgctcacgagaacacttcctcccgaccccgccgcgccgctggaaccgcccgccacgctcagcaaaccaacggaacccgtactactagatccgctggccacacgaacagcaccggatgcgccgtccaccgcagagccagacacgaccgacacagcgccagatgcagacccaccgctagcaatgccgcttccgaccgacacaacgccgctcgagacactgccagtgccgctagacaccgacaccgcgccgcccgtcgacgagctgctagaaccgcccgacacaaacacgctgcctgccgtggtagacgcctcgccagactgcacggacacgtcgccgctgctacccgaccccgaagaaccggaagacagcgtcaccacgcccgacgccgcatccaccgacgcgccgctcccgatcgtcgcagaaccgctcaaggcgtctccgctcgcagaagcaccgctcgtcacgctcacgtcgccgctgcccagcaagcccgcgcccgaagaaacgtccacgacaccgccagcgccagcctcgctcgcaccgccagtcagagcaatgccgcctccggtcgcagcgccagacgaaccagcaccgccagacaaggccacaccgccagcagcacccgtagatgcagtcagagatccgccgcgcacgctcaccgaaccgccgcccacactgctgtccgtactaccaccggcggtgacatccaccgagccgccggcagcactgcgacgaacaccaccagacaagctcaccacgccgtcctcgccggacgacacgtacacagagcccccgcgcgtgctcgtgcttccagtcgagccgccacggatatccacgtcgcctgcgtccgacgagacggaatcgccgctcgacacgaccacagacccgctcgacccgcttgcactggtgccagacgcaaccgacaacgagcccgatgcgccggagtcggcaccgcccgtgtgaacgcccacgtcgccactcatactcgagcccgtcgcggctgcgctcgccaccttgacgctgccactggtcgcaccgatgccactcaccagcgacaccgcgccgccagcagatgagtcgccactgcttccgccgcgcaccgacacagacccgccgctggacgcgacacttgacccgccaaccacgtccactgacccggacgagctgtcgagcgagtcgccactacccagcgtcacgttgccggacacgccactcgatgaagcgccgctcctcacattcacggacccgctggcatcagaaacagcagatgaacccaccgtcacgacaccgctggaggcagccgcgtcactgccgccgccgctcaccaacgatacggacccgccctgcaccacgccagaaccgcctgacacagacaccacgccgccggcgatgtttcctgcagagctgccgccctccaaccgaacggcgcctgctacggctcctgtcgaagacgatgtcgacagtgacgaaccgcccgtcaacacgacgccgcctgcagcggatgcggcgctcgaaccgctctgcacgaccacatcgccgccgtcagccgcggacggacccaccgacaagcggatgcttccagccgaaccagcgctgccagatccagacgcagagccggacgaaatccatacaccgcccgacgcagagcctgacgcactggccagacgcacatcgccgctgctgctcgggccttctccgctgagcaacgccagcgacgcgccgttgcccaacgtgctcacgccgccagacaccgtcacgtcaccgcccgtcgcgccagcaccaccggccaaagccaacgagccacccacgtcgtccgagctgcgaccgccggacacgcgcaccgacccgctagcacctgcagcctcgccaccagatacgctcaccgacccgctcgactgcgtcgacgacgcaccagatccgatcgacactgcgcctgacgaaccggtctcgaccgacccactcgtcaacgacaccgcgccactgctcacggaagccgcaccgctgccagacccgagcgtcactgcgccgctcaccgtcgaagcactttcaccgctcaggatcgtcacgctgccgcccgccgacgaatccgacgcgccgcccaacacagacacgctggagccctcacccgtagcggacgagccaccagtcacctcgatggaccctgcactagcgtctccggacccgcttccaatgcggacagacccgcttgacacgctgctagcgctgctgcgcacgtcaacgctgccactcgaaccaccggacacgacgctcgtagaaacggtcacgccgccactgctcacggcgccgtcgccactcgtcagcaacaccgaaccgcccacactcgccgcagacgaaccgccatcgatcgacacgtcgccgcccgcgccctgagcgttcgcagatccgacgaccctcaccttctgcgctgcggtcgcgctgtccacgccgccgccacgcaactccacatcgctgccaacaacaccgctgtcgccctggacgaggctcaggctgccgccagaaccgctacggacgaacacaccgctgccgccagcggagctgccggaggcaccgctcgacacagtcacgtccccgccgacgccgcttgaagacgacccgcccgacacgcggacagcaccgccggacccacttgtcgatgctgacccggcgtcgatgctcgttgctcctgcttggcctgtggaggttaggcctgcgtgtattttgatagacccagcaagtccggataatgcagaaccagtttgaagttctatcggacctgattgtttggatgcggcatctccagttttgatgagtgtgttaccggtcgtgcttgtgtccgactgttgtgtttgaattgcaatcgcaccaccgacttcggtcgcagcgttcggcgctaaaatcgatatgctaccggactgaatgttgccatgcccagatgaaatagaaatgttgcctccgagattggtcgaatctccaccttgtacaaccacatttccgggactcccggaaccaacagaatatctcaaagcccctcccgacgtatgccccgataggagggcaatatctccacttttctcaaccccagcacccgtctgaactgtgagtgagccagcttcacggacactctcgagcgacgttgtggacagcttcacatcaccagagcgtgtatcgctactagcactgcgtaattgcacgtcaccagcggaaccagatatgtggtctctctctgcattgaccaagaattcgccagaaacgcgtgtggtcgcagaggtaacatcaacagtaccctttgaccccgcaaacgagtcaccggtgcttacggcgatcgatccactttctccaacagcagaccacccggtcgtcacagatatacttccgctgtttcgactgccacgggagtccggtgtctgcaaattaacatctcctggattttcgaagttttcaccacttgcaatgacgacgctgccggccgctgtaccacttccttgggaagacccggcttcaagtaccaaagatccgccatcgccagccatgctatcgccagctcgaacgttgaccgaaccagagctagcttgggctcctccactagaaatgaagatgcccccgcttgtgctgtagctcgatgatcccgtttcgatgctgacatcaccactgcttccagtcggagaagcatttacgtaggaccccgcgtctgcagtggcgatgtcaatacgcccgctctgcgcctcactgttcgggcctaccttgaagcgtttgtgctgagcgtgaatagctgcaattaaatccattgtgatttgttgcttgttcacttcgtgaaattgctccaaactgaagtttttctcgggaagcgtaagcgttgaaactgtcacgtattctggaaacgtttcttccacttgttgagcaatgacgccacgaacagtgacgtcagggatacctcgaatctcgcgccacatctccgaataacgatatttttttacttcaagagtctgaatgcgctgcagaatgtcatcttcatcaacatcttcgatatccgtcttaattcgtcgatcggacgggtatgtgatctcggtgatctgggctgggacgtgactgatcatcttgtccggttgcaagcgccaaattactcctccaggtacttttgtttccccatgagatactgtaagctctccagtttggacactgatattcaggctgtccccgccgcgaatctccatggatgacgaagtgtctgccttaacactcactgatccatcacctgatacactcatgtgagacgcagccgcatccgttcctgaaacaactatgtccccaccgccagacttcaatgtcacgtgtccaccacttccggttggtgcagatgcggccccgctaactatgtcgatgtttccgccgtgggtagacccttcgccagacttaatgacaacgtctcctccattcagggaagtgctagttccagccaacacgcgaacggttccagtagagaaactagagctggagccactttgtagtgcaatatccccacttactccagccgtagcatccccactgccaatgacaactccgccacttgaaggagctttggctgttacagctgtcaaagtaccgctagtagaacctagtccggtggtaatttgaaccataccaccgttttctagcaaaacagtagaggaaccactagtgacgataacgttaccgccagcgacaacaggattggaagatcccgaaatggatacagtaccccctgcagttgagcctgtaccagcggtaagctccacattgccactctgggtagtgccagcgtttccagatgaaatttttacacttccagtcgaactgtcactgtcagcagttttgagacgtatcatgccactgtcaccaccagcttcggcgtttcctgaaagtacagcgacatcaccactggtttttccagacccggaagacacaacaactgagccgccaattgcagaaggatttccaccgccggtcaagctaattgcgccagcagttgccgttccgttaccgccttcaatactaattaagcctccgtttccactcgatgcaagtccggtataaagacgaatggaactggaactgcctcgagcagaacccgatccaatctgaaccgatccgctgttagcattgctgtctgcagattgaatcatgacgtttccactgtcagcacttccactagctccagagaagagccaaacatctcctccgttcttgttcgatccatctcccgaatgaagagatagcttgccaccaatcgtgccagaaccagcatgaacgccagcatcaccgccaatcgctgtttccgagtcaccagcagcaaatactaaatcgccaccatcaccagttgtgccagtagtacttccagcagacaaagacaaaggggaacccttcgcctcagaagacaagcccgcagcaatcaagatgcctccgccttcaatatcagaactccccgtgatgatttccacgcgaccggcagcacctgcaggtgagcttccagtggaaatagcaatggtgccactggaaccggctccagacgcaggggtagtagaaaccgaaacagacccagatgataccgagcccgcccccgtctcaaggtcaatggaccctccggtccctgaggctgattctccagctgccactgagatgttgccgctgtttactccgaggcgaacgataaagttaccaccagcaccagaagtgctatttccagtactcaaggcgattgaccctggagcaccagtatcggtacttcctgtggatagcgcgagagatccggacacgccggtgttcgtatcaccagaacccacagtcacactgccagttgtgccatctgacgaggttccagaagcaatagaaataacgcctgatccctttactccttgcccagacgtgatttcgacaagcccactgcttccatcaacgggggcggcttcagtttgaagcgtcagatccccgctcgatgaaatagcatttccaccactgataatgttcactgctccacctgacgcagcaacagcttcgccgcctctgaaaacaacaggcccaccaacatcggtcgtaaaggaacctccataactttttccaccgacaagctcaacagagcctccgcgaccgccaccagcctcgtcatctcctaggccaatgccaccaataattttgacactgccgccaactgcatctttcgcttgaagcgcatctccgccaacaatgttgacagtttgaccgtttccagtcattgctttgccagcagcgacttgaatgcctacaccttccgaaactgctccgaggccggtgctaagcactattgatccggcaaaactagtagcggagtcaccggtcttgagtgcaacctgtccggaagatccatcatcgggtgccgagtccggtgtttccaacgacaaatcaccgctagaagttgccgagttgtatcccgttgcaataacaactttaccacctttagctttcgaagaatctgtcgagccggcggcgatcgaaacatccccaccagcgcttcctgatcccgacccgacagcaatgttaatcgagcctgctcttccagtatcagcatcacctgtctcaatgacaacaccgccagatccaccctggctagaaccaccagtgttgagctgcagtgcgcctgttgtgctcggtgcttcggccgtgtcaattgatacgtcgccacttgacgtaagcaatgagctgccagaagagatcgagatggcaccaccagtggacgctgcagcagacccaccagcaatagcaaccgctcctccctggtcacgggccttgttcatgccgtcagaggatccagccacgatctccacattaccaccgttgccgccatccttgtcatcagttgaacgtcctcggccgccaacgaggcggacacgacctccaacggcacgagcagcagtcgagtcacccccagctaactgaatcgcaccgccatcgccaacagatccgagaccaacagctacagtgatattgccaccgccgcccttgacagcatcgccggttaggaccgatatatttccagaaccgggcatgtcggtagagtcaccagtctggatcaccattgaaccagaatacccagctttcccagctccggcagttgacaaagtcacgcctccgctggaagtcgcagagctctttccagattgaatcgcaacactgccaccaccatccgtatgggtcgttgcaccagcggtgacagctacattccctccctggtgaccaacgccggaacccacaagaagtcgaatgtctccaccagctccatgttccgatgcgccagagctgagagtcacagagccagaggagccacctcgagaatctccggagtacatagtgacaatgccgctaccaccgttgctaccgccgcggtcagagctaatgtcaatgtcgccactagaaccagggaatgaaaccccggtgacaacgacaactgatccagccttcgcagcagaagtacttcctgcttggactaacacattcgatgcgccttggaggctggaaccaccttgcacggaaatgtccccactggttcctttcgttgcagcgccggagcgtacggaaatggacccgcttccctcgttagtagtcgcaccagtcccaacgctgatgcttccagaggagcgagtgagcttctcgacagcgtcgccagaaaagatcttcacatcgccactcgaggaggaggttgcatttccagtaacgactgtcactgatccacccgtcgcggcgttgccttttccactagctaggcgaatagatccacctacgtctgtcgtggaacttttaccgctggcatctccacctgacacgacaacatcacctccatcaccaccgtccttcagatcggagctcaagccactacctgcagtaagtgaaatttttccaccaactgaggccacagccgtcgtatcgccagcccgcgcgatgatgtcaccaccgcttccggttcgaccggtgccaacagagacctgcacgttgccgccatgacctccagttgcgctgccagtcgtcagtgagatcattcccgagtcaccttgcgcagctgtaccggatgaaactgcaatcgaaccactcactccagctgtcccggagttatcggtgttcacagtaatgcttccactgtctcctttcgtactgtaaccagaagcaacaacaacacttccaccagtttgtccaactgcagatgtcgagccagccttcagcttcaagtcgccgccagctttggccagactattgccgagggaaacgtcgacactgccgctgctacccctgtcagaatcgcccgttcgaagactgtagctgcccgaatcgccatcttggcttttgccggtacgaagctcaatcgagccgctgactccatagtaagcggaatcggccgtgcggatgctaacgtctccgcttgagaaatagtcagaaccgccagtgataatactgacagcacctccagttcctttgttggcctggccaccctgaagagtaactgctccgcctgtgtgtgtgcataacgaagcagttagaagtgtaccgatgttagcatttcctatagtaagtttgacaacaccaaccgatatctcctccactctggcctccggctgcgccaccaacaacgttgacaggtccacctttaccacctccaccaggagagcgattggttccacgaccaccagtaatagccacttctcctccagttgatctgagatcgcccatgtcgccggcagttacggcaacacgaccaccgctgccagtccagccagaccctacactgaccacgatgtcaccagctgggccaggcttagcacttcccgtcgctacgaaaagcgacccgctcgggcctgtagtagcattcccagtttccacccgaagcgttcccgacactcctttcttgccagagtcgacagtcatgagcgccatatctccgctgctagaagtcgcccccgtgccagagaaaagctcaactctgccgccggttgaagttctactagttccgccttcaacgtgaacgattccgccaatatcgctatcagctttcccgcccatgccttggcctccgcggacttgaacagcacctccatcacctccattgcttgggttaatgcttgtgccggagccagcttgaagcgagatcgttcctcccacttgggcggccgctgcaataataaagacgattagcttcaataacacactttactaaaatgaagaatgcttacctgaagaatcaccggctgtcatattcaggtccccaccgttgccagtatctcccacgccaacggacatgatgacattgcctccatggcccttttgcgctagccccgttacgaaggtcatcgcaccgctgtccgtcgactgtgatttcccagtcgtgaacgttaatgaccccgagccgccattaggcccactgtttggcgtctgaaccagaacatcacccgacgtagtttttacagaaccgccagtggtcacagtgacggagccaccagtgaaggagtggagtgcaagcccagcgcttatagtcacatcaccaccaggattttcggtgttatttccgacagacaaggaaacgaatccacctttgcccttaagagcttgaccgctgtacacagtgacttctccgctgtcacccgccgtagtgtcaccggagtttatgctaacggagccacttgtaccctttgttccagatgaagctgtcatcatggacaatgccccgctggatgtggtcgcgccaaagccagtttcaacgcggatactgccaccacgtcctctgttcgcaaagccaccctcgagggtgatacctccgcccgtattcagtgctgtactgccgccttgtgaagcaccgccagtcagttttacaacgccgccattgcctccgttggtaaacgcaggactaaggccttcaccagcctgaatggcaaccgttcctcccgttctgccaccggcgtcagtagtagccccggctgtcaactgaacttggccaccatccgtcttcgtaccggtaccaacggtaacaataaagtccccaccatgcccaagcgttgcagcacccgtcgcaagcacaagtgctcccgagtctgtagcagtagctgttcctgtctgaagcttcacgcctccgcttcctccggccccgccggcattggcagtattcacagtaatgtcaccgctagaggtggcctgacttgcccccgaaacgaccgacacaactcctccggtgcgagaatcagtcgtgcttcctgcttccatggaaatcataccaccttcaccaaagtcgccgccgccaacaaagagttggacttgacctccttttccgtttttagcagctcctgtagcaaaacttattgggccggagtttccatagcttgacgttccagtggacacgtagatcatgccgcttgcaccccgtgaacctgcatttggcgtgtagattaagacagccccactggaactagcaacccccgagccagaagacatggatagatcacctccataaccatacgccgcgcggccggaggcaacattgatactaccaccattatcaagtgagtttgagccacgtgcttcaccaccgataatgtccacatcgccaccatctcctccgtctacggcattagttcccgagcccgtgccaccagttagagtgactttgcctccggttcggcccatcccggatgactcaccagcactgatctgaacatctccaccatcagttgcatcaccagctcctacaagaacctggattgagccgctgttacctcttgatgctgtacccgtcgacagcttcaagactccagcagtgccatcaggactgtttccggtggcaatagacattgtaccactcatgcccccgctcgcagcctgagccgatgctatctcaacagctccgctccaggagtttgcacttcctccggaaaccattttgacgttaccaccgacaccgctttgagctccgccaccccgaataaggactgcaccgccagtatcttgtgcagaggatccgagcgacgaaccaccggctagaacaacttggccgccatcacctccatctccagaattgtcgctcgtaccagaccctcctgttaggtacagagctccgcccgtcgtagcagcgtgtgtcgaagatcccgactcgacagtgatatcaccgccgtcgccaaggccattagagcccaccttgagagaaacacctccagcctgaccttgagacgtaccggttccaagagtaactgagccagctcttcccaacaatgtgcttcctgtgcgcagactaaagctgccagagtcgccgaacgcagctgagtcacccgatgccaaaagaatagcgccagacgagcttaagcttgatttgccactgtatatgttcacagcccctcctactgaggaggagctgcttccaccttgaagcataagctctccgccacttccatcaatagattgacctccgacaagcttgacccgtccgccgtccccttcagcttgggaatgaagtccatggccacttcctccagcaatgcgaacctcgccaccaacaccaccgttagaggacgttccagatcccccactaagctcgatggctccgcctgttccgctgtctccagccgtgttgccgctaccaatgctaatgctgccgggtgagctttccgatgaggagccagcttgcacttgcacacttccagcagagcggcgagtagtgtatccagttccaacgacgatatcaccagacttgccttgtgcagctgaaccacttgtaagactcagtgatcctgtgccttccccaaccgcgcttactgcactcgcaatcttaacaattccagtgattcctgaagtactcgttccagaagacaggtggattgccccaccatttccactctcagtgggtccaccagtaagagtgactccgccaccatttccaacaatagcctttccgccgcttagtcgaatgtcgccgctcgtaccctgggacgaagtgccacttgagatatcgactcgtcccgagtctggtccggagtctccggtcgagagacgaataacgccgctcccaccttgaacacccggtgccgtcttgatgaccacgtttccgcttgactcattttgactgaggccactaagaagcgtgacagatccgccagctccaccagtagcatttccaccaacaacaatcacatgcccaccaacggaaatatttgaaactcccattgaggcaccaccgctgacggtggttgtgccgccagacgagtcatctgcatttgctccagttccaccaatgattttgatcgcgccaccagttccccctgccttgactgttgagcccgctgtagcaacgatctctcctcctttcgcagagtttccaatgccaaccttcagtgaaattgaaccagaacttgattcatttgcgcttcccgtgaacagtagcaacggcccggtgggttgagaggatgagtttccagacccaataaccacagcaccgctcgacccattcaccccagcactgccagtgacgataaccacttcacctgaagctttcgtgccagaaacacccgtctccacacgcactgatccaccgactgcatctccgccggacgaaccgccacgcacaaaaacgttgcctcctttgccaccgtcggacgaaccgctggacagcacaattgatcctgcttcctccgaggacgaaggccccgtgcgaagctccatggaacctgatgccttgaacgccgcacccgtctccagaataactctaccagacactcccttggtggtgacagcggatgttcggatggcgatgctgccgcttgacgacacggtgctggtgcccgagacaatgttgatggacccgccagtggtagcaccttcaccaccagccaagtcgatatcacctccagtcccgacctcggacattccgcccgaaagctgcacagctccgcccgtgaccgagttgtcgaagttctggactccgagcccgttgcctccggcgatcttaacagtcccgccacgcccgcggttctgatgcaccccgtcgcccgcagcgatttccaccgcgccaccagccgtgttgaacctgttgtcgtcgccagcgcgcagctgaatcacgccgcccgactgcacagacacagccgactggttcacgacgagggagtagttcgtcgagtgcatggtgacacccttgacgacgatccccctgcgcacgttaggcggctcctggtggatgatcacatccccaacaatgatcgtctctgctcgttgtcacacacgacgcacaagtaacgattcagtttttagtccccacggaattctactcgcaagatacagctgcacgcacctggaacgaccacggtcgggcatggcgcatcactgaccagcgccttgcagcccgagccgaagccctcttccaccgccatgcacgaggcgtccgacgcgcaccagacgcactcgtccgacgcggcgcaggtgccgcagtcggtgatggtgtcgcactgcgggttgacggggcaagcctcggcctccgggatccagtcgctgcaccaaacctggtagcggtcgaacggtccctgcaggttgccggccacgcacgtgagtgtggactggcagaaaccgcacgacggctcggcggcacagtcgtagcaccggtccatggcctgccagaattgcgtgtccgggggcggcgacagcgccgagcagttgaccaccgacacgtggccgtcctcccgcacccacgacttggccgtcggcgccgacgacacctgcagcgcgcgcagactccacacgcccagcagggtcgccagcaccgcgcccgcccgcaagctgccgctccacttggctcctccgccgccgccacggctgctgctctctccttgatcttggttgttacttgttgctctccacatgcttgctcgttactactactttctcgactgaaatgcactacttttttataggtttttactgtttctcttcctgttttatgggggtttgtttttatttaaagaaaaatgaaagaaaagacgaatacgaagatgaagtccacggacccagacccttccggctacagccagatagcggaagagaggggtcgcgccaacctcgcgtcagtcacacacacgcaatacagtcactcaactcactcgcgcgctcccggggaaggcgggcggtctctttgtcgcccaagacgagctctccgctcgcaagaggaggcccgcccggacacgctcgcgccgtctgctgcgtgttcgctgcggcgcgtgtcctgtgctctgctcggttctcgtgtgtgttgtgtccctgtcctgtgctcgctgctgctgctgtcggtcgctgtcttcctcgtcgctcgcgcgctggtcgctgaaaacgaagaatgggcggggggtcgctcccgtcggggccactggccaatacaaacgccaagtacgagccaaagatcgcccggtccgagcaggtcaactgcgcatgacacgcttcctgcgttgaaaatatggaaagaattggaaagtcaatctcggtcgccaacctaccggagtgcataacctttcggagcactaactggtcttgtaccggccccagcaagatgtactatactccgctacccattgtgaacctatacccctcgcagatcgttgcaattctgagcagctgattgctcagtcgctaaggcactgttgcatcgcatatttggggtgaagggtcatacctcaatttcagtcaccattccaatcccgagagtaacaacctgtcacactccataccctgcgtcgccgcgataggtcagtccgctcatcaccccgagttcatgtctgccacatcaagcgccttcggctggcctggacacggtgctggtacggatgcttggtgctgccacctaagccgccaccccagcccgcaggcaccacctgcagtccttggtgagcacgcgctgcgccctcctcatactgtactgggcagggtttgcacgcgagtcgcagtcgagttgtcgccgcgcaagagacactgcgagccaagttgaagtcgggcactgattgcattagtctgaaggaaagcgagtttggcagtcgaccgacacggctgcgttgccgaccgacacggctgcgttgcagagctccaggaccggtgtccttgccgtttatttaacgaccgtgtcaacacaagggccggccgttaccggcgcggttacttcgcggggggtattgccgattccctgccgacgagtcgagcgtctcggcaattgcggtgcatgtaccggcaagaccgacacggtctttgccgctcggggctcggtggtgagacttgagtcggtcgtagcccaaactcacgcccctggtgggcacacttgcttacgacggtggcagcccgagactacgcggcactgaaaagctatggttttatttatttttgtagaatgccctaccttttactagtactaaaagttagtgtagagcggggtagaggtagtcgttggtgagcgaggcccacttgcagccatccttttggacggcgcgccagcagctgtgcgtgatgttggcgatctcgtggatgaagaggccgccgcgctcgtccagtgtcttgagcccgaacgtgtccgacgtgtactcgagcgtgtcgttcatgttgacgatggtgaggttcatgtacttggtctcgatctcctcgatcgtgtccacctccgagtagcggccaaagatggagctctgccacggcatgatgcgctcgtcggcgggcgaggcgaagaagtgggcctcctccagcttgaggaagttggccttgcggcggcgctggtcgtaaacgcactggtcgtcgcccggcagacagcggttaacgttgttgtacacgggcaggaagaagttggcggtggagaagctgccgaactgcggccagcggttgacgttgaactgcgagtacgtgtactgcgcgtcggggttctcgatggtgtagatgacgtagtccttctgcatcttgccgtagtagtcctccgggccgtaggcgctgtagttgaacatggtctcgggcacgagcgtggcgaggaacggcccatcattggcaatcgagtactccaccttgtcggggccgatgaactggccgttctggaggccggctatgctgatgtagcgcttgaccttgtggtcgtccatctcttcgatgactgcgcgagcgatggcaccgccctgcgagtgggcgaggaagatgtagccgttgtcgaactcggagctgttggcgacgatctcacggatctgagcgacagccttcgggacctgcaggacgatcgcctctagcgagcagggcatctcgcaggtgagaggtacaacggtacgcccctcggccgtgaggttggccacgaaatagtgaaaaataatgaaggaaatgtgagctgctgaccgcgagcgcggcggcgggctcttagcatgctttgtcgtaaaagttgtcgcttagcactgcacacccgacagcctctacattcgttcattactcagagatgatgaatggtcactcagagatgatgaatggtcgcacggattccattgccttaggcgattttggtgtggaccgctctgtaaaagaagtctgcaggcacaccctgcagagcctttcttgcagcgatggaagtgtaacgggctaccgttggcgcgcttgggtcgtgggttttcgaaatagttagctggtaacatcgctgaggtggacagagatgcttagcttgggccagccgtagtaaccaagaacctaacgagcaagtaaaggaatgttcagtgcagccgacatgggtgacgtacctgcgcggcacaataggctacgtgaggcaaaggactgcagacaagcgaggcaagcgaccatttattggttccatgcaccaaactttcaggcaaagagcaaccaacccccttaactatgttgtacccgtaagtgtacgacaacttttacgacaaagcatgctaagagcccgccgccgcgctcgcggtcagcagctcacatttccttcattatttttcactatttcgtggccaacctcacggcggaggggcgtaccgttgtacctctcacctgcgagatgccctgctcgctagaggcgatcgtcctgcaggtcccgaaggctgtcgctcagatccgtgagatcgtcgccaatagctccgagttcgacaacggctacatcttcctcgcccactcgcagggcggtgccatcgctcgcgcagtcatcgaagagatggacgaccacaaggtcaagcgctacatcagcatagccggcctccagaacggccagttcatcggccccgacaaggtggagtactcgattgccaatgatgggccgttcctcgccacgctcgtgcccgagaccatgttcaactacagcgcctacggcccggaggactactacggcaagatgcagaaggactacgtcatctacaccatcgagaaccccgacgcgcagtacacgtactcgcagttcaacgtcaaccgctggccgcagttcggcagcttctccaccgccaacttcttcctgcccgtgtacaacaacgttaaccgctgtctgccgggcgacgaccagtgcgtttacgaccagcgccgccgcaaggccaacttcctcaagctggaggaggcccacttcttcgcctcgcccgccgacgagcgcatcatgccgtggcagagctccatctttggccgctactcggaggtggacacgatcgaggagatcaagaccaagtacatgaacctcaccatcgtcaacatgaacgacacgctcgagtacacgtcggacacgttcgggctcaagacactggacgagcgcggcggcctcttcatccacgagatcgccaacatcacgcacagctgctggcgcgccgtccaaaaggatggctgcaagtgggcctcgctcaccaacgactacctctaccccgctctacactaacttttagtactagtaaaaggtagggcattctacaaaaataaataaaaccatagcttttcagtgccgcgtagtctcgggctgccaccgtcgtaagcaagtgtgcccaccaggggcgtgagtttgggctacgaccgactcaagtctcaccaccgagccccgagcggcaaagaccgtgtcggtcttgccggtacatgcaccgcaattgccgagacgctcgactcgtcggcagggaatcggcaataccccccgcgaagtaaccgcgccggtaacggccggcccttgtgttgacacggtcgttaaataaacggcaaggacaccggtcctggagctctgcaacgcagccgtgtcggtcggcaacgcagccgtgtcggtcgactgccaaactcgctttccttcagactaatgcaatcagtgcccgacttcaacttggctcgcagtgtctcttgcgcggcgacaactcgactgcgactcgcgtgcaaaccctgcccagtacagtatgaggagggcgcagcgcgtgctcaccaaggactgcaggtggtgcctgcgggctggggtggcggcttaggtggcagcaccaagcatccgtaccagcaccgtgtccaggccagccgaaggcgcttgatgtggcagacatgaactcggggtgatgagcggactgacctatcgcggcgacgcagggtatggagtgtgacaggttgttactctcgggattggaatggtgactgaaattgaggtatgacccttcaccccaaatatgcgatgcaacagtgccttagcgactgagcaatcagctgctcagaattgcaacgatctgcgaggggtataggttcacaatgggtagcggagtatagtacatcttgctggggccggtacaagaccagttagtgctccgaaaggttatgcactccggtaggttggcgaccgagattgactttccaattctttccatattttcaacgcaggaagcgtgtcatgcgcagttgacctgctcggaccgggcgatctttggctcgtacttggcgtttgtattggccagtggccccgacgggagcgaccccccgcccattcttcgttttcagcgaccagcgcgcgagcgacgaggaagacagcgaccgacagcagcagcagcgagcacaggacagggacacaacacacacgagaaccgagcagagcacaggacacgcgccgcagcgaacacgcagcagacggcgcgagcgtgtttatagtagcgtactccctatgcactaactgttgagtcagctgtacgtgtaaataacagttagttagtgtatagtaaattttgctaacatgtatctgccgaacgagcatcactaatttttgcacaaaaatggaaattactaaagatttttacaactttatctacgccgctccgatccttctggttttctatattttaagacgctcttgattcgatattgtggcccacattgtcccaagtcaacggtactgtcgcattagatgctgccaagtctactccagatgccagtgcagcgccagagccgtagttacttgaagtgccagtctagaacggatagtcaactccgatcgagatgatcgacgaatttgaagacgcagagctgaattcggcctggcccgaatatatttcgctagaagacgggtctcaaggacgcagagtgtttagatccattctgtaggtaagaaagacatcctaagaatcaatcagaaagacgcgctgtccgtccgagagtagatcacgcttatccactaagtacgattaccactaagtacgatttgctgctgagcgcagcgaaggcggctccgttgccgaaggcgacccgaccccaccatacgatattgcggggccgcaggacccgccccggcctctgtattactaacctgacattgagagtagtgcagcgagccgacgaggcgagcggaacgggtccactactgccgtagcgaagcgtaggcagcctgctcttatagcgcagcgagcattgcgagcgaagcgccaactaacaaaaaattcaccgccgcgtggtggcggcgctcggctagttaactgcaatcagccttaaggttaatatatatcatgattattcctttgctactaactcgtcaactaacagtcagcaaacgtacagctaacagtgagttagtgtctagtaaatttcactaacagcaaaacgccctacactagtttacagatgtctgtaaactcaaattgttcaatgaatgcattgtaaattattgtcctaacttctaagttaggatttgaaacaaattattgattgttgtcgttcaaccatggacgagcctcagcgccaactgcagcgcttgattttcccttggttgggcagcatgagcgggctcagcccattgactttgggaacttgcctgctgtaggttcgcagacatggtaagtacatgtacttttaagtacttttaagtaagtactgccggggccagactcaaactaaaggggggggggggggcagaggtccgccaatactgtattttattgaattgggatcattgtcaacccctaataaatattacaattcctggacaaacaataataaatattgccgtaatttatattgtattggagcattgaacatactattttatcgatttagaggggtaaaactggcgtcacagcaccagcagcgctcgaaacgagcagtttagtagcatcatttgcgttgatattcaagttactagacgtgactttcactatgaggcccatctgaatctcaatcagcgcgtagctacatgttgcatgttcacagtattatgatagcggtcggtgtcccaatcctgttttctctcgttcaagggtcatttacggctaatgcagaatctgcattgcagatactacagtagtcgctagggtatggaacttacctgaacgtggtattgacgtacccttagtgctttgtgactagagtttggcatcatcagtcgaaaattctatgcaagcggacttttattatttttattgtcaataattgggtcaatatgatattgtattggaacccggttcgcccagtaataaagatttttattggaaaacccagttatttactgtattgcaatattgttttccgacctctgtcctcctggaggggggggggcagaagggtcaaaaagagatatgttagaggaaccaggccccacaaaacccgccccggagctgtaggtttctggagtgagcctcaagaagaaactgttacgactaggaagaacatggtgcgagcttaccttagcgccgttcatgctggaagcagttcaaaatatttacccgcggaagcaaaaggcgactgttcaaatccgcttcgatgctgccgggcgacagcgacttctttctggcgctctttggtgccctcgcccacgtcgccccgctcgttgacagcccgcagtccacagctctctcggccttctccagtccatccgacgcgctgctgaagacgctctcagcctccgttccaactgtcggccgctgcattctcgaggagattcgagcggacgtccgcgccaacaagctgcagttgctgcagcgccagcgcctgggcctgaggaaggcgcgacaggccaagcgaaggcagatacagcggctgaacgcagtggtcgcggcgcagtgtgacgcggcgctgctggacgccgcgacgcacgaccagaaattcgagttcttcctaacggacacgcacgccaaggcggtagctagactgcaggttaccatcgctgttgctgtggtattggtgcacatagtggtgactgaccgacgctttgagtgcagactttattctatgagtgcattgcagagatgaagaaggcgctggtgcgcatggagaacgtcgcggcagacaccacggaggagtctgaaagtatggtaaattgtctagctgtgtactttacactttggaactcgatcatgtggcaccttggcgatgccgtattggcattgagattgacttagaatttgtattaggtccaggagctactacggcgctacgagtggcagttgttcctcgctcgactgcagcaggattgcagtggcgatgtcgaggcgtccttgcttgtcccaccggcatcttctcgcgacaaaagcagtcgaagctcatacgctttagaaaacacaccagtgaaagcggttctgcaaagggctcttcaggagcatggccccgcattggaaagtggagattcgctggtggtgcggtccgtcatcgcactgaagagaagtccatcaacccgccgcgcttccgagaaaaccagatctgttttctcggaagcgcggccctcactgcacttcggcgcgccagctgaaatgttgacagaagtcatgggggtcctcatgcgccccctaaatacctcaaaactccgacggcgcctcccacctcgaggtggggccgaagacctatcgaccccatttttcgctactggtggtggcatgtgctcgacatttcgactagtggcggctagggagacgctacagtttcccgggactgcgtgcgatgttccgttgagctccgtgtttattcgttggatggatggcagacggcagactaaccgtagcggtttacttcccggtgccgacgatgcagacagaagtggctgggggctgtacaacgagctcgcggattccaacatttattttgacgtagctgagtacgaggaaaacttcgcggcagtcatgcaaaactacgcgacaagcgccaccctcgatgccgcttcgatgccgtttccagttgatcacgcagtgctagcctctgctcgacgatctttacgggagataagtgccatcttggaacgacctcgtgatcagaaggaagctaaatccgccgatacgattttcgcacatcggcaaacgggaaatggtgatattgatgcagactccaaccagccagaagctgttcatggccatcgcggtacttttgcccgtgcctccgtactccagctcgtgcaaacactttattataccaagaactttctgagctcgctgacaccggctgatatcgacatactgagaaaactgtaagtgcatctttatcaccaatctctcatgaattaacctttgactcgtttttaagcagctacccggcaacactatttggtgagggctgcctctcaacactctatgttcctgtcttcggtggcgtaaggaagcgtgaggtgcagcgagaagagtgtaccttaccagcctcttcttcggaggttgtcatgcatccattggatgatcgtgcaattcacgagctactgttcatctatgttgctcgtggaaagcacacactaatgcaagacgggagcgccagtgtggattcgaacgagaagctgacaagcttggcatattcggatgctgtcaacacattgataccatgtcggcgagtggaatccaacaagcgagctgcttctccattttgcgttatcaagaacgctcggggattatgccagcaggacggagggctgagtgcgcagaatgaatcttcatatgcgacggagctccagcagtttgcagatgcagatatcgtctttgttgaggtaagtttgaccgaattgaaagttcttggcaccgagctgatttcctggtggttttcaatcagtgcgcggcttttccagcccgccttgggtctgcccgacgaaagcctcacgcgtcgacgaacgtcaagacaaatgcggttttggagatgctcggcacgtcttgcatatggcgctcctgtattagtcacgatctttctaccaactcgaatctatgcaaatggcacacttccgtccaggtacgcttccgacgcatattgcaggctgtgtccactctacttacatctcctttgtatacactaaagcattttctcgaggttgaggaatcgctgcagtacgtgccgaatgaaacacgaatgagagaggcctacctagcagcggaaagtggctcgacggctgaaaagacaaagcgagtcatccagacgtccagctcgcttttagaggtactcgtacgcatttgttagcgctgtttttgtgagccagctaacaattgctattttgtgttaggaattatcatcgagacacctgccgcagtctatcaaggccttctttgagcacgtcgtcagagctgcatccaaccgcaggtatcagagcgaatacgtgggagcggtggggctggagaagtttgcctcattaagcgacctagagcagtctcactacgagctgcaacatttggtagatgtgtctgaagagatcgtaggcactgagaatcgtgttactcgcgagctccgacaactccaccagctaagtacgtcctcaccttactggtggcgggaatgcaacaagttgctaactcttttgtgtgcagcggtgtacccgggcgttgaggactcgttcattcagcacggcttcttcgacttggaggaggtatggccacctcatctatcagcccgtggtttgcgttgacatcatggcactaagccgcacgtgtgtaaatgcagcttcaaagtgatattcgcacacgagacttgggtctgctgctgcgcctgagccagcagaagttgcagattctggagcatcgacggagagatgaagagaggcaagtcgtgcgaaggcttgcgccatccacatcgttgccggccatgaactttcagccagtgtcggagcagccagcagcgaccgacccagccttagtctcgtcatccgtctacgacgtcatccacgtcatgcgcaaaggacggcagtcgctgttaaggcagcagcgtcaagatgctctggacgggggactacgaaatgggtccaagcgcagacacggcctggagcgctgcgcgtcggacttggcgtatcgtgctagtccgtacgaggcgaaggtagcgccgacgacgaaatctcgcgcgggtggagctagcaacggcaagaagtctgctcgacaagcgcttggacagatgaacgcaagataatcacaggcgaatgaatagagcggaagcaggcggagttcatttgatctgacacgagctgcgcactgctctcaagctacacaatgcagtcgtcgtgagccgaggaccccatgttatacggttgtttactaacagcttcacggctgcgtgtacggcaggccgacgttgccccagtcgcacgcctccgacatgacccgcgccacctcgacaaaggtgcgctcgtcctcggccgagaacccgttcttcttggggcagtcgagatcgatcagcgcgatgacctcgccctgcttgtcgaagacagggaccaccagctccgactcggacgcgtcgtcgcacgcaatgtgcccggggaactcgtgcacgtcggagatgcgctgcacggacttggtgcgccacgcggcgccgcagacgccgctctggaagcggatgcgggagcaggccggcttgcccatgaagggtccgaggatgaggatgtggtcgtggtccgtctccttggggttggacagcggccgcacgaagtagaagcccgcccagttgatggggcgctcggcctccaggaaggcgtgccagatgatggccgacacgttagcagcgttggccacgtagtcgcgctggccggtggtggcggtgaaggcggccacgtcgcccaacagctcctcggtgttgatcggcgccaggtagttgtgcagctggccctcgtcggggcagtccgggctccatccgatctgcttcacgagcgtggcaacgcgctccttgagctcgccctccgccgtaacggagaccacctcggcgctatccttgaagacggcgagactcgacgccgccatctcgctcgacggcgactgcaccaacgtctgcaaatgcacaaataatactgtcaaaccctcctccttgtggcagatcacggcactgcagggtggagcctcagacacgtacaatgtcgtcgcggccgcggaacaggaacacgagcggcaccagcagcttctgcagctcgcgcttctgcttgcggtcgggctcctggggcagcgagagcgccaccaccggcttgctcttggacagggcggccgcgctctcctgcgcgggggcgaagagctgcagcgcggcgtccaacggggtcaactgctgctgagctgccatcttggccgatgaatctaaagtgacgtcagctcagcctgagaccatcgcggctcggtcccttttgcgctcaggcgagtctcgggttgcaccggcactggtggcctgcggacgtcttggcacaccgaggtgataccaaatggattggccgcggtggccaatcgcagagaccgaatgctgctcctcctcctgtgaggggccgcttacgccatgaggtgtggtcactcaccttcatcgtcctcgacgacgaccgtgcctgtcttcgcgtgcgctgttggctcgtagtgctgtgctctgagatgtactcgagccgcacctgtggccgctgctgccgcctccacctcacactgcgcgatacgagaacgcgacctataacattctgcggttcgtgtgcgcggactctctctcggtttacgcagtgaatggtgtagtgcagttgtagtgggtagtgtagttctcgggttacagcgagcatgcatggccccgccgaagagaagcgctaggcttggcggggtgagtcacccccgggtgaagactgtaacacaactgcaacccagatattgaggcttctccgtggctcgtcccagacagcccccgcctgaggcttccgacacattttctcattcgccagcaacgatggagagcagcagctcggacgtggtcggcaatgggagccatgcggctgcaccgtcgacaagctccatgcccactccgctccagatcgcgctctgggtgagcgagtctacctactgccctgcattcgtagacgccgtagtcactaacgctttgtccgatcatgagatcagaatggtaatccaaggcagatccgcgagtgcctggaggccggcggacaggacgcactagagacgcgagaccgtcgcggcaatcgagcgctgcacttggcgttgaagttcgcccaccggaacgccacagcgatcgtaaaagcagtgctggtacgatttggacggttctgcaaggggtttgctcatccgggacatctattgatatccaattggccgctttgttactaggacgctggtgctcgtgttcgctctcgtgatacggaaggctggaaggccattcaccacgctgtggtagcggaaaacgaggagattctgcgccttctcgttcgcagaggtgggtatcgcccagacagtctgcatcgtacaatttcttacccgtgttgtgtttcctttagagaaagagcaagcaccggcgctgctgcagaagaagatcgatgacatttgcccccggcttgctgaagtgccggacttttactgcgagatgcgcgttgacgtctcgacatggatccctggagtctctcgctggctgccgtcggacacagtgaagatttggaaggcggcgcaggacatgcgcttcgacgtcactttggtggggttcgagaacggcaagtgggaccgaggagacctgtccttcctgctccaaggctcccagggcaagttcttgtgcttggacaacgaggcgaagacctgcaccgacctgctgaagctggacacggagctgtcggaggcggatctggatcaaatggtgcacttcctgatgaccacgtcgattgttacgacggacttcgacgcgtcgaaagttgccttcgagaagaagtttgcgtggttttcgtccagccccatgcggcaagacattagctgctggaaagacacccgcgtagtcgacatgaccggcgtcgaggcctcactgcgctatcgtaagcctcacaacccgaagcacccgcctccaaaagcttcgagcgaccaggtatgcccccccccctttcaaaagtttgcagtatgcggtacttacttgttgtggtgtgtccagactactgcgtgtgatgcggtgtcgctactgaccgaagtggccgccgttggcgatcactacacggaggtagtggtcgacccgaagtcgaaccacgtcgtgtctgtggagttgaggaagggcgaggagttgacgtggaagttctccacggagaagcgcgacatcaactttggcgttcgctttctcgaagagaataatggcgagcaatgggacgaaatcgttcccctgcagcgcacccaagcacagctgaaagagcaggcaggatcgttccggaccacctgctcggggacacttgtcttcacatgggataactcatactcggtcatccggtaagctttgatcgttctctttcgcgggttgaccttattgtacatgtactaaccccccatcggacagaccaaagctgctgcgatttactattaatccaggaggtgagacggacggagattccactggaaatgaggactgggacgcgcaaacgcgggtcaaagaggaggagatgatgtttgaagactggtttggtgtgtcgaccgagagtctgccggcctcgctgcgtgcgatgcgacctcgtcgctgcatcatggtgcacacgcagccctcctgccgcaaaatcaccaagtcgttccctgctacggtgtacatgtgcgaccatttcccgctcagcgtaagttgacacccacgtgcagtattctaggctcgcagattttgacgtggtgtgtcgcgtcttggtccaggtgtccgagttcctcccggttattgaggtgctctccaaaaccacgagcgccttcgagagcatgcaggagtttttctcggcggtacgatgctgatactctgctgtttacatgaaggctaagacacttaacaattgagtgtgatgctgttgacgtaccaggcattgacggacgggttcccagtgcagttctgcttccctttggtgccgtcggtgtcagcgaccttccgatttgatcgcatggagctgcagacaccggagagacacctgttcactgttcccgccacctacacgatgcaagttgaagacatgctctcgccgcgcacgcaccaggcgatgctgcagcgcgtgacggccacctaggatcgggagccgtgtcttcgtaatacttcaacgccgtattgcaaccacggatctatgatgatacacgtaatacatgtacccccaagcctctatggcaagcttgcaaatgcgcatgctgccgcgagcaggcaatgaagcccccacctccactcgtggtctggaaatgctctttgtgcttgatcccccagttcggaggctccgtcggcggctacagactttcgtttatttgtacttactacgtagtaggtctctatacttccggcaccggaacgaccatgcgtcggcaaatgctcgagcgccgctcagtaggcaggcaggcttcgctcggtgatcattgttgcgtgggccacccgaagatttgcgtgcgtgcgccaagttgaagtacgcagagaccagcacggccgccaaggggctcgcggccagccaagcgcagtcgccaacttctcgcgtcctgcgcaggtacttagcagtcaagaagagcaagccgagagatcccaagcgccatgaacctgctgcgcctgctgccgtgcgcgctggccgccgccgccgcgctgctggcccccgcggccgccgaggagcgctgcttcgccaaggacttcatgttcggctcggccaccgcgtcgtaccaagtggagggcgcctacatggacgtggggcgcacgcccagcatctgggacgacttctgccgccagcggccgggcctggcctgcgccaacgtggccgacgacttcttccaccgctacccgagcgacctcaagatgatggccgacgacggactgcagtccttccgcttctccgtgtcctggtcgcgcgtcatgacgtggaaccccgccacgcgccgcatggtgcccaacccagcgggcatcgcattctaccacgacctcatcgacgagatgaccaagaacaagctcgtcccgatcctcaccatctaccactgggacctgccctcggcgctgcagacggagctctcgcccgccggctggctcagcgaggatatcatccgccactacgtcgaattcgccacgctcatgttccaggagtttggcaccaagctcgactactggacgaccttcaacgagccgtactcgttcgtcacgcagggctacggcacgggcgtgcacgcgcccggcttcaccggctcggacaagaacacgtacattgtgacccacaacctgctgcgcgcccacgcgctggcggtgcagaagttccgcgagttccgcgacgcgggcatcgtgcgccccaccgcccgcatcggcatcgtgctggtggcgcacatgatgttcccgctcgacccgaccaaccccgaggacgtcgctgccgccgagcgcgcgctgcagttcgactacggctggttcctgcagcccatgatctccggcgactacccggccgtcatgcgcgaggttgtgggcgaccgcctcccccgcttcacggcgcaggaggccgagatcatcaagggttcgtacgatctcttcatgctgaaccattacgcgtcgaaaaccgtgactgactgtgactcgcccacctcgaagcgtagctgtgaccagcttacgctgggctgggagaaagacaagggtgtcgacgatacgcgcgcccccgaaggctcgcgtctgtcgagtaaggaccgccacggcaaccacaactgcggctggttcactgcgtacccgcccggatacctggcgctgatgaagtgggtcagtgcgcacgacccgtccgccgacgtgctgctgacggagaatggctggtgcggcaacgatgaggtcgacaaccaggaccagatgtggtactacgaaaactacatggagcaggtctacaaggccgtcacggaggagaacatcaaggtcatcggctacacggcgtggtcctacctggacaactacgagtggggctccttcgagccacgcttcgggctttactacgtcaacttcacttcccagacgggctccaaggactacgtctcggcaaagcccacggagctcgagcgcattccgcgtccggcagccaagtggttcagcaagctggccaagaccaagtgcatcccttccgcgtcggacgccgccgcggccagtgcccccagcgcatcgtccgtcaacagcagtggcggtctttccatgtggtctatcgttggcatcgtggtcctggctgtcgcggttattggcgctgctgtcgctggtatccgcgcgttctcgcgtcgtcgcggttcgaacggcgagcgcaggccgctgttgtaagaagcgagcatttgtggcacttagcaggcaataggaacacatcaatctctgctcaatgaacactgatgtcgctctctattccttctcgtcgtggcgtatctcgcagcgcatgcgatcttaatgtgcgggccttattaacgcatgcagaaggttgtgaatctcatgcagtcatcctgatgtgatcacagtttttgatcacatcagggtgacataataccgagcagtgcaggaggagcaggcactgcgagatcagctggcgcgaaccagccaaagcaagagctcaaggcagtgacgctgcaggtggagtaagcccatcgagacgagctagaccacgagctggacagacttgaagccgagaagcgcaagctggaggaagacctcgttaccggttggcaaccaactcgcggttgccgcccaaaaaaacgggagattaaggccgactacgcttccagcagcttgatattgtgcgcgcgcagttcggacacaaacacacgggcacaccccaagttgattgaatcgctcgtgttggtttcagcagctctacagtagtgcctatatcttcgttggccttgcgagttgttgccgtttgactgcccctcgctttcaccaggtgcgttttcataaataggagcagtcaaacggcaataacgcaagcccaatgcccttggtgaataaatctatgtgagctgtggtttgctgctgaaagcaatttttgattctgagatagcatgtgtaccgtaaggatgaatatcgtcaaactgccgacagcatacactaaaaaaaatgatttttgtatggtcctgtgagccaatagaaacacagctgaagccttttaacgaatcatacagtgttccagcgaaatcttagccaattaaaacacaataggggtagggtaacggctaccgacacgtggccgacgcataatgtcgacagcgacagccagacatttgagcgccgattcaaaaagcaagtcattcacatatttgctggatatcaagaagccaaccgacactagactcgaaaacaatgagcctgcaagacctcgctccagagaacacgaagcgagcgcaagcaacagcagtcaacgtcttcacggctttcctcgcctccgagaatgtcactctcgaatttatccgcgctaccctcctggcagctgccagtggttcggtgctcgtgaagttgctggaccgcttcgcgatgcacctcgtttgctcgaggccgaagcggggatctacgcaagcggaacaccgtgatgagctactaccggaacgtcaagaactggctgctggaggatttcccccagcaccgccacattgtggagcagcggctactcaagatgggtcgtattttggagcgacactgcctcaaactgcagcaaggtggtatggtgacgaaggcgccagcatgcaccaaggccgacttgcgctctctgatcgacggactgtacttcgatgcgagttctgccaaggagtatcacgatgctgcgctcctatccatcatgtggtacgcgcttggacacgctcccgatctcgcgtttatccagaagcgcaacctggcggtcggctcgggcaacgtgctattccttcgcctgatccgagcgaagacgtcggaggagcaagacctctctctcttcccagacaagagctccttcatcacgtgtccgctccacgccatcgccatggcataggcgatgcaaacattcccggtatcgtctgtactcgaccttgagcacctttcggggctgaacgttggagatgaagcgcctgcaacggaggctacgccacttaccgatgcgcttgtccactgtagcgatgatgatgaacctgctaatgcaacaccggaagcgagacgtaagtctaccccgctgaaaatgcaagggtacgtcaatcgagtgctcaaggccgcaagcgcacgtcaagctgatgctggtgtttcaagtggcctctcgtctcattctttccggcggggcggtgcgcagcatgccaacgcggatgcttcgttaagtcctcaatggatcttcgatcgtggcagttggaatatgatggcgacgaacaaggcctttgcctacgttttcaacaccacgagtgaggacaggaaagtatcgaaagtgctcagcgactggaagtcaaacgacaacccgaccataccttcggctgccacattcgactctgcaacgacgacgaagattcgcaggcttggtcgcatgttgtttgcgtccagcttggatcttggggacgcctcattgatcatcgatgatcaagtcgcagacctgctagtggcatcattcatccagcactttcctgaggtcaacgagagatacccgatgagcccatacacttcgcggatgcgcatgtgtcttttccctcttcaagtgtcgatgccggagccgctgggctggagtgtggagctgaaacgacaagcaagtgaagttcgagaagaagaagaaaaacccttcacacgtgagcttcagttgttcaaccatcttaatgcagtcatagcccaactcgtggaagcgaacaaggcgcagtccgagcgcattgcagagttggaaaaacgggtgccggttggtggtgcagttgcttcccaggccggctcaaccccagacacgatcactgaccgtaccgacctgtcattggccttggacaccccgatgaagccaaccaagcccaaggtccgcgaagcctcgaagactacagccgcaacttggtttgagtggtacacgaaaacccctcgcatctgggaagtctgtgacgatcgccagtacaagtctcagtcaaagcagattgtcgccttcatgaagctattcctacctctgggattcagccttgaccccaccactggagagtatgcggaccgtgtcatgcaagctggcaacacagctcagaagaatatgcatgagtttcttcaagtgcgaggtatcaagcgcaagttcggctcgggcctactgaaacaacttcgcgcacttcatcgagatggagctctagacgagctcattacccggtaccgcacaagtttggctcttggccagatcgccgaccctgctcctgaaacgacaaaggagtgtttttagaagcactttgggattttggagaaatcatgcgactttacagtttgatggagttttttaacctattaaaggcatgagcttaaataagagcatatacacttcccatggttcgttacacattcaaaccactgtggcataccttcaccattttgcaatcgccaacacgaagccgatggttcacctcagccagaagaaatccaagcgcgctgttagagcatttattaggcgtgagttccccctcgcgtatgttacagatgaagctttacgctaccttcgccacgtgctgcgtgaacaggttaccgaggctccaagcccaaggggaccgttgtttgacgtcctctcgctgttgcaacagcagactggtcgtagaatcgaaggccaccacgttctggcatggcgctcttcgcggcgccccagcctccgacagcttcccagtaccggcgcgaatgcatcccatgcagctgcccacgagtcgacgcaggcgcgcgaggctgacggcaacctcgcgccagtcaacactccgctaggagctgaggagaatgggggcgccgttgccactatcgccgccgccaccgcttggaccagcaccgtcgagaaccccgccagcactgtcgctgaagccattcccaccagcacagctgttgaagccacacccgccctcactactgctgcgaagcttgccgctgatgatgttgcagaagagaagcacgccaccgctgttcctgctgccgaagagaagctctccgccgccgctgttcctgctgccgaagagaagctctccgtcgccgccatcgccgtcgccgaagaaaaggtgaccaccgccgccatcgccgtcgccgaggtaaaggtgaccaccggcgcctccagtgctgacgctgcacaaccgctcgctgattctggggacgactccagcgacgacgacgtggtctggatcccagctccaagcggtctacctgtcacaactggcagcggttgcgtgctcaatgccgacgatgggcgcgacgacagcgaggcgagcgagaccgaatgggtcccgacggaaaacctggccgctcctccttccacagctccgcagctctacaacatccgcgcaatcacaaactcatacatgagaaacggtaagagagtttaccttgttgagtgggagcagaccaagagcctgccacgaatctgcctcggaacatggttgccgcatacaaccgacgccgcagaacccttgtccgtcgaaccttcattgaagaccaagctggccacagccgtggacgacttcgaaactcggaacctgcaccagagcgccgccgtcgccgaccacttcgacgacttcgcagagcccttcacttctagataacgcaggcacaagacaatagttcgaagggttcaagcgcatatattaccattgaggaacgactacccaagtacaatgaggctaagctgctttcgcggcacaacagtcttcacctcgcaaaacagctaggctacgccataggatagcacaccaagcttaacagccgcatcacagcctacattaatgcatacaatatcaacaaacgtcagacacgtgagcccaataccaccaagcttccccagtgcttacctcatcatctcgccgatgtccttggtccttagtccatgctggagctgcatgccgcgcgtctttgctgagctgctgctgccgcggggggacccgcctccccccacgcgcggacgccccttgctcgctggcaccgcccccgctgcctgtctgcgtgctggtgctgcatgcctgccgcgcgcctttactgagctgctgctgccgcggggggggggggggggggcgcccccccccacgcgcggacgccccttgctcgctggcgccgctcccgctgtctggcttcgtgctggttgagatgtgttctctctgtggcctgtccttagcgacatgtcgtcttcgtattctttaagccaatgataattttattaatattaacaaatcagagtcagtgctagtgaaggttttagccaataagattgatgtcggccgtgtcggtcgctgtcggcaccgtcacgctatggatgaatatagtggtctttccgacagataagagaccaggattgtttcatggtcgtctatatagaaataacagtccatcatattctgacttggagtaatttcagccaataaaatcaactaggggtagggaaatcctttccgacacctccctacatatatttgtcggaatcctaggctgaatatgtatataatcatactgaaacccagtacaaaaaatattttcaaaatattttggcgattcagacaactaggcaaattcctactgtaggcataacttattctaggtagcgagacaccggtggacagccaccagtgttaatattgcataacgaaagtgtcctcgcggtcatcatgagcctctctgtgtttgtgcctacaaacacccaaaaggcgcgaacgacggcgattaacgcgttcgagagaatgctagaggtcgagggtgtgagcatggaattgtttcgtgcaagcatacatacagacccctcgggcaaacgcttggctgccacaatggaccgcttcggctattatctcgccactaatgacggtaagaaaggtaagctagctcgtaacacagctacatcgtactatagaaacgtcaagctgtggctatttgatgagtttccacacctgcgtttacccacggagatgaacttgttaaaacaagggaaaactctagataagcactgcttaaaatgtgagaaaggaggactcgttaacaaagcgccgccatgtactaaagaggacttaggttctctaattcgctatgtctacagcacagcacgtgtcaactcggactaccaagatgctgcgctagcctgcctcatgcggcactgcttcggccgctcgtcggacctaggctacctgcgcaagcaacatgtgtcagtgtcagcggacggcgtcttctacctgcggctcctccgcgttaaaacggctgaagaacaagggttaacgctcacacctgacaaggaggacttcctgacatgcccgcttcactcgctcgcggtagctctcgtcatgcagaccgcgccctgcgcggctctgttaagccagctccctgagcttgttgcgacgagcgaggagccgctagaccccggtgtgccactgcaggccttgctagaagcagagccagctacgctcagggtcaccctgatgccaccctcgcctgctgtcgccgctccctttcccgcgccaagtcccgtgccaagctgcagctcaagtccccaacctgcaaacacagaagcacaagtgagtagtacaacgaaggccagcgctggggagaagacgcgcggtgaagacggtgttcaggcgtatgtcaaccgcctcctcaagcgcgttgccgagcccgcgggagccacgaccgacttgacttcccactccttccgacgcggcggcgctcagcacgctaacggagacgatcgccttgccgctcagtagatcttcgaccgcggtgcatgggacaggagcaaggtcaacaaagggttcgcctacgtgtacaacacgccgcaggaagaccggaaggttgcgcgagtgctaagcagttgggaggccgccgcagctcctgttgtccttgatgctgcggcgctggatcatggagctcaagagcgtctggcatccttgcgcgaattcctgttcagcacctgtactggactcatggaacacagcctcaacgtaagcagcaaggtcctcaccgtcctcacggcatacctggtccgctactacccgcagctaaaggcgctggctccggatgccccgattgttgagcgcgtggaagagtgcttggcctccgcggggatctcgacagctgacgtgctcgcattgtcggtggcgctcaacgaacaagcttcacctgctgaacctgttgcagaacaagcacacgaatccaagacgcactcatgccaagtccatcatcaccttctagctgtcattgatgagcttatcgcctcgaaccgagccctctccgcgcgtcttacaatcgggaggctgcgcaactaaagtgtaagcgaaaacaagtacccgatgaggagccacagacacaaaatacgtcagatcaagagccaaaacccaagcgcagaaagaatgcaacgaccaacctgtccatcgcgtggttcgaatggtacacgcgggtgccacgcgtctgggactccgccgaccgccagaagaagtccgagtttcgccacgtcacggcgttcatgaagctctttgtgagcgaaggcttcacgcttgaacccaaggcgccggactacaaggatcaagtcctggacgctggccgtcgggctgagaaagccgtgcttgccttcctgaagtcgcgcaacgtcaacgccaagggagctggaagcgtcttgcgtgcgctgcacccactccacaagaatggcgtcttggacgagcgcattgccgcatacaagacgctacgcgctgtcggtagaattgttgatcctgcgcctacagagacacaagacgtcttagccactgtaggtcacgtctaagaaggttagataacaccgctacttcacaaacgcattcatgcaccagcactaccggcacaacacgcacgcacgcctcaccaaccacgcacacaggaggaacagcagccgaggcacgccgcagcagcgaggcacagaagaagggtcacgcaggacgagcagccgtcgcaagcccggtgcggtagcagcacggcgcagcagcagcacggcgcagcagtcggagacacgaaacggcagcaccgagtcaccgcacgacgcaaccccaacgccaatcttgatcgataacaccggcctgaattgaacaggcacctcagggccgaagccctgcgctctatccattgagctacggtgttggtgcccaggggggggggaggcggggggaggggggctgcgactggctgattggctgcggctgaatcttggtccggaggcttgatcccgagctctgaaaaaaaagcagactgagggcgagcgccgtgtgtcggcgactggcagccaccaaattttcgttgggacaggcggcgaatgctgattggctgaaggatgaaccaatcaacactctttattgcttaaggaccctgattggctaatgaattagccaatgatatgccgtggggggatagctaccgccggactgcttctaattgtggcccctctacggcctcactaatgaatttgccggctcctgtgcacattactccggggacaaaatgcgccaatacacaaaatgtcaattttctcggcccaggcttctagaggcgatttcctcgcggctgtgagcaccgcatgaaagctgactggaatcggtcaagtggccccctagacctactctaccgtacacatgatctaatttccgattttacattatttccgattttgccctggctttgacaaacttcctagttgtcggaatatgtagggatgtcggaacggccgcgatatggtagaatatcgtgtccgttcggacatctagaatttcgcattacaatcgtacactagtgcttggcctatcagaagactttctcatactttgtgagccaatcggcgtgcctcaaatctcatgctttgccgtaagtaacaaatcggacaattcggacatattttgtccgaacatctgaaaaatatttgatatttctatagttaaagtcagtaagtcacatattctgaaaatatcgtcaatattcggacacatattaattttgaggtcgccagacagacgaggcagcataaccactcaagaaacgactcatgtcgacgaaagcgctcatacctgggaactcccagcgggctcgctcgacggctctcaacgccttcgagcgcttcgcggtcgccgagggcttaaccgtcaacgccatctatgagtttgtaggtggggattcaactggcgatactctctacattgttctcgacaaatttgcagtgtatttagcatttaaagaaatctcgaacggctcgctggtatccaagaactcggtcgccagctactttggcaacgtcaagaaccaccaactcgagctgtttccagctttaagtgccgtatcgggtcgtcggctgcaaaagattgcgtcaatcctcgacaagtactgctccaagcgaggcacagactttacgcaccaggccccaccgtgcacgaaaagcgacctgcgctcgctcagcttagcgatattgaagggagctgtatctgtgcaggactaccaggatgcagcccttctcaacattctttggtatttgctgggtcggtcttcagacactatgtgtctcgtgaaaaaccaggtcgctgtataccctggtaagtacttgtctttttatttttcctaatttggttttgaccttgtgtatttttaatcgtggtacacaggtgggtgtctatttatcacctttaagcgcatgaagtctgcctcgtatcaaggagcgtcgattttttactacccaaacgatttttcgtcttgcccaattcacgcactagctttggctacaattatgcagtcgacgccaagcgagtttctcatggatcaacttcctcgggatacacaagagctcctgccgactgaaattggcgaaactccgctccgcgaactacttgatgcgcgtaccaggtccccagcaaccttcaactctgagtcgccgaccccaaaagcaccttcgaaaaaagcgacagtccccggaattcacgcgtatgttaatcacgtactgcagaagtggagtggtgtctgccaaaccaaagttactaacctgacgccagggctatcatcgcattcatttcggcgtggagctgctcaaaacgcgaatagtgacagcaaaatcaacacaccttggattctagaccgtggaggctggagcatgagtgctgtgagcaaagcgttcaattatactgttggcacgacgcaggaagatcaaaccgtcggcaagtcgttagctggatgggatttaaaagctagtccgcggctacctgcactggacgacttcgatcctctggttctgcatcgaattcgcctacttcaagaccggcttttctcggctgcgaaggggttcacggagagactcagcttgcgagatgatgtagtggacgtacttaccgccaccgccattctccactaccccgacatgcttcggcttagaccaaagtcactgtacatcaaacgggttcaagaagcactaagtcaggtacaggtgacagaggctgaaattgctgcatggtcaatggctattcatcgtaccttacagccgtccaagaccgacactccacgcagtccggcaccacggcgtgttgaagacgacgaactcttgcggaggcaaaccttgctcttggagtagcaggcgcagatccttggagggctagcagccgaagtgaaggcattgaaccagcgggtgcagcggcttgagcacccatcggacgtaaccaccgctccgtcgacaacagcagctggtagcctgtcgagctcgtccagcgctttgtcggatactgcaagtggtttatactgccgcagtggtttctgcccccgttgccaagcgcgcgtccaaaccggcggcgctatcacgagtgcaagttggccgtggcctttatgcgggtttttctcccagccggatacaacgtgaccggagatgaggtcacagcaaaggtacgcatcctgagctcaggacgggaggccgaggcaaacgttcttgctttcctggaggctgagaacgtcaaagcaaagtcgcatgacacaattgttaatgttttgaagcggatgtatgctcaaggcaagctagacgaccgcatcaggaattaccagcgacttcagcaggaaggcaaggctcttgaagatgcactggtgcatgttcttgagccctacaacaatcacagcacaacgtaattgtagtcgcgatccagtgttaggtccatacatagattcattcacccatctcgttatctacttacatgaaatgagtgtcacagtagatgtccgccgtaggcatctatctcatgtcgtcgaccccgcttttggccgccacctccaccacctcctcgtcctcctcagcggctgctgctgctgtcctcgacggccgccaccccgcccgaggaccagtcgcagtacgacccgccgtcccgcacgtcttgctgctgctgcagctgctgctgttggccgcagtccccaagccgttgtccactaaacagccgctgtatgggggggttaaaggcagtctatttgaggcttactttgtcctatagttgcctgatatgcaagaagctgtgactggatagatccggtcggctgtctggatgagtccgaggggctgggctgatgcttccgggcggaccgcaagaggtacgcatgcaacggtgttgctgccgcctctgctgtcatgcagtcgaagtcatacgtcgtgttcgttgtgttcttcgccaggatacttgcggggcgtagcaattgcagtgaaggattgccccactgcacactgaagagctgcccgagaagttggctgagctcgtcggtgtctgccgcctgggttggtctgttttggtgacggagtatgttcgagtggccttcgatgcggacgtagactgtttctggtgttgatgcttggaggagctccgcgataccttgggtgagaacttggttggccatgtcctggctggagtctgtagctgggaaccccatgctgccagctttgcgggtgtgccacgtcccgttggcgcgttggtgatacaggatccatccgcctcctggcggtgtctgctgctgcgagctaatcgcacaatgaagacaccagtgatcgagaggtggcgtccatttggaggtgtcactcgtcgtcatgatgccgaggcatgtctccaggcaccatgcctgaacgcgggtcgcgctcttcttcttccaagctgctgttatcgcctggacttggtaaataccagccgaccacacggctgctcacgtttcttgtggagatgagtgttcgttgttgaagacagcgtcgttacgcaagcgccacagcagcacaggggtcacggtcgtccatatccgccataacgttgccatcgcttcgttgtggtggggtgtccatgtcgctgtgcactgctgggcgtgggcgagtagctcgggggtcactgctggtggttgtcgctgggctatggccggctggagactggcgatgtcgttctgggaacactcgcggccgagccacttggatacccagtcccgccatgaaagctgggctttttcgcactcccagatgatatgatcaatcgtttcgcggtgagtcgagcatgttgcttcggggaaggccaggtgggtgggccatccttctcggtagaggttcagctcaccgagcgtgattcggtacgtagtccagttttggtaatccgtaagaggccattggtgccccacaactgagctgggctctgtgtcagtgctgcttttctccatgatgatcgttcttctcttcgctgcattttgtccagcattggttgaagcgcgtgctgcagcgtttgtcgaattaaccgtgagcgttgtttgcggaccgtcgtcgcagccgctctgccaggtgtagctggtggtactgcccacgggtagacggtggttcctggcgcagactttacgacgagcgctctcatgcgttcccagctctgagctcggcgagatcgcctgtgctttcaagcgcaggagctgcagacgctaagtgccacgtccatccgtcctggttccttgtaagtgtcagcgcttggcgagtgagaccgttgttcgcgtacgtggccgtgatcgtgtttgttccgggggtgatattccataccagtggcgctgccagcacagggagttcgagtagccgtggctgtctatcctggacgctccagtagttccacgggatgctgtgagcgatgctcagacaccagtcgagcacgtgtttggacttggtggttgccgttcgcgcaggttggatgaggacttcctttctaggtctggtaaccggtggcagctggatgataatgtctcgcgtacgtccaatctggatggtcgggtagtcgcgggcccgtagcggcctgccttttgcgtcgaggatacaggcgttgttgtcccatggtgtgttaagtaagaagtccacgtctaccggtggattatcttgccgtggcgccgccatgtcgtcacgagaatgacttttgactctggtccgatccagcaacagttgcttacctcgggacccgcggattggggtcctgcaatggttttcacgtcgtcaggggatggtgttaagtttcgagaatgcgcttcccatagttccaattttcccaggccttgggccgagatctgcggttgcccgaagtgttcacggagcgcagccgaaatcatggctggcgatgttggcctgaacgcacaacaaaattttgtgcgttcttgttgggggtgcacggctgcgtgccaggctgctgtgtagacgtcgtccggagaatggagccatttgtcagcgaggttactccttgatactgcaagcgcacttgcaatgtcttgaagtccaagcccgccgtgttgctgcggagtgtagactagagcagggttaagcttgtgcttgactggctcagttcgtgtggtggctgaccaaacgaagcctttttgcagccgtgtcaattcttggagcgtggctttggaggggacatactgccgtccagtgtacaggatcgctgggagcgctattgcattgaacaatgtcaccctctggacgacggaattgcccatggtagttgctattcgaagtcggcgttgaatgttttcaagtcggattgcccaattgagctctgtcgagtcgtggttgccgacccagtagcccagttgtctagacgttgcggttggttcttgtacagggaacccttgccatcgcgacggtgccttcgctgtgttgagaccaatcaatacactattttgaggctggacatgtagtccggacagctctccgaacttctcgagaatgggtttcacaatgtcgagttcctttagagatgccatgtacacagtactgtcatccacgaacgccgagaacttgtgtcgatgagccgtatcccctgggatggcgacccctgctagagctgggtgttggtcgatggcgtggaccagtacatttacggccaggatgaaaagcagaggggccagcgggcagccctgacggattccggagttcacaggccatggtttggatatattgccgttcactaggaactgcgcggtagttccttcgtttagcgtcaggattacgtccaagaattcaggaggaaacccgtagctacggaggacaagctggaggatttctcgtgacaatgtgtcgtacgccttgcggagatcgaggcataacactgccggtgattcttcccacggtttcgtcgggtcgtcaaagctggttgccagaatcgcccgtaggagcgtgactgttttgtcaatgttgcgtccccgcacaaagccttgctgagccgagctgatgattctgggtaagatagcgtgaagtcgttcagccaatatgcgtcccagaaccttgtacgctgtgtttagcagtgcaattggtcggtagtccattgcatcagctgagtcccctttctttcggagcgggatgatcgtagcacgcaggaacgaatcgggcacccctgaccccttgaagatggcattgtagagtctcgtcatactcggtgagagctcgtcggcaaagtctttgaagaagtcgtggtttagaccagtagtcccccctgctttatgccttggtagctgctgtatggcggctatcgtttcaggttccgtgatgggagccaaaagtgctgccacttcgtctcgccggagccgcttttccaccggaatgtgcacaaagcgggtgaactcttcctcgagggaactggagtcaactgaagcgtgggatgacccaaacacgtgattccactccgaagccattcgctcttcactcggcatggcatccgggtagaagtgacctggagagggatcaattctggatatgtgctggtctcgctgccattccgagtcacgcttaaacaattatcgcgctgtttccggcgattgctgtatgctatcaccgaaagaccgagcagcacggagacgtgctgtcgcatcgaggtctttttgatgctctgctcgcgatgccgtcggttttcgcgttgctgctcgcaggttttcgaagtaacgttgtgtctgctttcggtcctgtcgacttgtatctcgaataagattctggatatctgccaccagcttgtcccattgacctaccgggttacctccgttgtcgaatgcatccagtaacttgtgaagtccctgtccaagtgcttctcggacacgctctggtctgccgctgacgatcgggtgctggatcgggcgatgactcctttggtgtcgacggtgtcccagtgaatgttccaaccggacttcataatggtccgaattgtgggccgggggtagtgcttccacccactgcactgccgcatagggctgtcctttgacgtagaagcggtctaggcggctagccccatcctttctccaaaagctatagtggtgaagcgggtcatgatccacatcttcttcgtcaagctggtactttagcgagactgcgtcagttagttcgagcccttgtagcatctcctgcaggtacggactttcgcaagaagcagtgctcggttttcgacctgttacccggtcttgctgacgattcagcacacaattaaagtcacctccgagtatgatggactcatgatggcgtagccaagggtccaggtccgaaaaaaattccaggcgttccgcttggtcgataggagcgtagatattgacaagcagccagccatcgaactccacagccatcactcgattggtccagctttctcgttgccaaggtcgaactttgctgctcacgtgcggggtgcagagtattcccaatcctgctgatttcgtttctgtagtggtccagtaactcagcggatgctccggtgcctttcgcgcccacgtccggttccagcgttgcttgactgcccgaacttgctctgccgtgtgtagtcgcgcgtcttgtaccatgatgacgtcgggctccgttcgcccacgatgctttttccagtcgttgagccagtgtcgtcttgctttttttgcgaaccccatcaagttttgagttgcaattgatactgtttgtcttgcttgttttcctggtaatctgcggggctggtccgatgcgaacaatgtcgaaacattgtatagctcactgaagtagtcagcttctagaggctctgctctcacattgcaggtttcctttagcatggttaatgaagacacgggtctggaactgaagttgaagcctcatcgcgaggctgcgacgcgcgtagcgccagcgttgtttcaatgatggcccaacactcgaacgtctgcgctcgatacagcgcggcatgcagtgctggtatttgttcgagaactgtgaacagcaacccgaggtgttctacaactgagctgagaggtccagggggtgttgctgccagcgcccgtaactcgacttcgtatatgaatgcagctacgatcattctcgagagtacatgcgtttcgttcttttgacagagctcaagtagccgagaattaccaaagttcgccgctttcagtgtattccacatcaccggtgcgtagatgtccagcttttcgggacttccggcagcagtttcccgtaggtccgcgcatcgttcaagcagccattctttgcgaccgacatcttggtcaggtactgctgcccaactctcgagacagtgtagtagacattctagccgactctgttcggtccacgtatctaacaccgcatccgtcattgtgctcaggatatattctggcgattcgaagcatccgcagtagacttcgtggggcctcggagactgtgtttatccacgttgtggtatctgcaggaactgtcgggaatggtgacattgattcctttgcccatcgagtttgcagccgattccaccccgcttgtaggtgtttttttcgcagccggttgcttccaagttgggattctaatccgtgaaaacgaccgacaccggtgcgagtcgttccagtgtctccttcgtgagggtcagcatccgcctgtgtggacatcgagtcttgactccagaccgatccgctggtattgctggggcttaggtctgacggggttacatccatactgacttcgccttgtcgtatgcgttcctgccacgacagcagttgctgtatactgatgtcataggtttccgtccatgttgttaccgctgccgagtcatcccagtctaagtcatgcagctccttcaccttaccaggggagagtccatggattcccgccgctgggaaagcgtgtaactcggattccggctacccccatgttcctcgatcgcgtcgccctcctggcgttcagcgtcagtcaggtgatgtccgtccttctcactattacctgctcccatttcagtcatctccacgtcgttagccgaattggccgcaccagcagacagcgtcaggtccacgccttccttcacagttaccgatcctgcggcagtcattggagcggttggctgattgaagcgaagtcgcatgtagtaccgtgctgtaagcagcagaacaattggagctgtgccctctgcgtacgttgcttgacgcgccgcttgaagccgctggatccatccctctggtttcttcccttcgtagttgcgttccctcacagattagaaagtctcgcccgattttgctgcttcggctggctggaagatttgatagttggcgtcgtccagtcccgaaggcgcaacgaccacaaagatttctcgttgaagaagttttgccaacagccgcagcgtcacctccgtgccccagtaacgatagtcgatgtatgctgcaagcttggatgttgtgcagcatagtgcgtgcaagtagtccttcagaccttgcgctgattgcgcctccgttaggcgctctttgccgttggttaggccttcgtccaacgagcaaagtatcgcttcacgaatatcgtgaggaaattcttgctcgaagtagtggcttaccgccgaccacattcctttcttgagcttcgatgtcagattttccagcgcaggtacgctgcttttgtcggcgaagtctcggttgaggagagccatggccaccgcatagtactggcaattgcctgttttcggtgtggctacccgctccaagttacagtgctggagcacccgttcatcggagttcaaggcctgcttgggctgctccgccagtagcgccgtggcgttgcctacgtcgccctggtcgtccacaatgtgcttcgcagcaatttgcgactcaatgagacgctggtgcttctccattgcagccgttcggtggcgctgcctcccttgtatttcctcactgatagaacgtccgacggtctctgcagacggcttccttggtgcttctgggatgttcgctgcttcgaccttcgttacattcgaatgcgtgcgctcaaccagagcctggaggtgctgagcagcgcgcggggagccagcagtgacccattgtccagtcggcttaggcggcgtgcgttgtgccgatggtggactcggcgatgcaggcttctcagggatcctagtgaacagtcgaacagtgggcgtcggggctttagctgctactgggggtgggggggcatccttttcttcgatccagtacttttctagctccgcgatgctagttatcgtactcgcttggtggggaagttgggcaatcgctgccgtggtcaccgttacacagtagtgctgcttccaggaatcgtcgggcacgttacactggtttcgggtgtggccagaggcccaacatttgaaacaaggcggtgccctagaacggcttgcatgttgcactaggattttgtggccagcccagtcgatgaaccgcattccgttgagaaattcggggcaatgtgtgctcttgaagtacacatcccatgtatccgtctgtagcttacgggcctttgacgacggttcttgccacgtcgtgtaggacccatggaactgtctctggatgaaggcatcgaatgctgattcgttcagaaagcgggacacattgagtaatcgaacgtgatagcgctcccgtggctgctcgtcgtggatgccatccgtcccaacttggcgggctcataccaaagccgctctggtcttcaagtccacgttatcagtgagcaccgcgggatgttcgttctgcaaagggaagcgtcgactccgaaaggggagggagtggaaaacggcgctccacttagtggcgagttccctcatccagaagatgagatggacagcgtgtcgtccttcatcgtagcagacctgcttggtttctcgtagcatagcgaccacctgcgtcttgtcatagcctcctcttcccacccccaataggatcatgcctatcagccgttcacgggtctgaaaatcgggatatactggaaagtcgggttggagaagaaggaccaggtctacctccacttgggccttgatcgtattttggatgactcgtagggacgcattattgcagatgcgtttcagaaactccggcagatgctcacagagaatagaatctattctctgtgagcatctgccggagttctattcaatagatccttcgaggagacctcggatcactttctgttctggctccgttggcttgcgcagtagtgcaggaaatccgaatggggcttcacacaaatcccgaagttcatctatttcctccggagaatagattttccgcagaaatcgaaacgtcgacgtggaagatcccgtcatttcgacatcattatccgtagcctcatttttcgagagtagcttttgggaccatgggtcgctcgttggtcctgccttgactggaagttcagcgatacggtggtcaattgtcttcgtaagtggacgtgtatgcgctttgtagatcgaccgagctagatcgtgcatggctgcccgccattggcgctcgttcgatcgcccactgctgagatgagccagcaggaactgaagcattcgctctccttcttcatcggtgagttccgggtagtgattgcggtcagcagggagcggttccttaggtcgtgcgttgaacacctctgcgaacatcgcttcggcatactcgactgcgctgactacgtctttggccctggtgagatcgagtccggtaagctcactgcgtagatacgtgtacatctctgcaaacgtgagcttctcggccgtttcctcctcgtggacagcgttgacctcctctgccgccctggcttcttggtctgttgctggagcaacctcgtccatctccacatcgggccccggtgcctgggacgtgtcagtgggtgttggcgaagtcatgtcgatcacctcgttatcctcttcttcacgcgctaccctgcggtcgtccggcggcttgccgtgccctcccatgagtccttgatcccggggtgctggtaccgtggtcgttcgattagagggtcgtatagtttaaccaagtgtttcacccgctctggctcttgaactgtgttacttcacgccttcctcgtttagaaggttccccccgaacacgccgccactctcgtcacgtcgcggctagtaagcaaaatcggaagtgacagccgctgtatgacagaggattgcaaaatattttatgtgcaccacacttcacggagcatttaatagtatttatttttaaaggttgtccgaatttccgagccgcacggtatggtatgctgctgcaggattaaatcggtgtcgcatgtatcacacctgtttaagtatccatcatatattgaacttttatgaaagtaaacttaataggtcatctaaataattatctagtcggtctctatcggtgaggaaccatcaattgcatcatcaagtttcattcgaaccatttcccattctcacgcccgacccgaagacgcaacaccaggacgaagttacagcacgaaggcaagtgcttggtagggcgctgttgcagctaatagcttgcttgcacacgacttaggcgcgccgcacttgcggcgcaccagtcgtgtgcgctgtgcgtatatctgttctgttttattttcgctatctcagcccccgcgaagccctgaaaaacgcttgtatgcatgacgctcacttccgcgcaattgcagtgagaggaagcaattctacagaatacatagtttatatgtactgacgatcgacgcatcgggcagttttggttcatggttcttggtgctgcgtgtacacaaggtgcctaaatcatcatggcctcgtcggagatgagctcttccgccggcgagtcgtcctccacctccgcttcatcgttgttgtcccagacgaggtcggacagcgatgcgcttagcttcttgtacgcatcgtggaacttcaggcacgcgccgctcgtacgccggaactccaccacacaccgaccgggggcctatagcagcaattccgatacaaccacgtcaagtcagcacacgtcctaatcggtcattccagtacgcatacagatgtcggcagccaaaacacataagacacacagcaagcaagcaccagagaggtagagcgacaagcagtgtgaggctgctagttgcggtcacggaccctcctcctccgctcgctcgcagcaacgacgtgctcaggctgccgccggtcgtcctcgcaggggctccttacattgtctagtgagtagatgcgcacagcaaagcccacgtcctcagcatccgcagtcatcgtggccttggttttgaagcggtccttgtgcgccacaaagcgcgccgagtgctccgtcagcgccttctccacgcgcgtctgcaactctgtggccgtccggctcgactggaagctggtatagagcgccacgctggcggccgggtacgacggtgccttcttcgaacttacctctgccgttgcgggcgccgctgcagtcggaatcgccattgatcgctcgacatccatgttgaacgggtcgaactcctcgtcttgttgctgcagacgctgcttagcggcagcgcgcagcttctcctcgcgctccttgcgcttctcatcctccacctgcagcttgcggctgagcagttctgcacgcagctcctcggatgatacagcgttctccttgaaccagggatgtgtcttgatctctgcgagtgtgatacgctcctgcggctttacgttgaagatgcgcgtcatgagcgacatggcgccgggcgagaaggtggcggagcgcgcgtgcgccgcccaaaatgcctcgtgctgcttggcagcgcaggctctgaaccaccagtcctggttggtggcgatctggaagggcgggaaccccgccagcatgataaatagcaccactcccgcggaccagacatcggcgggctctccttcgtacggaaggcaggacagcacctccgggctcatgtatcctctggtgccgcactgcgtgtacagctcggcgacggcgccgtcggccccctctctcagtcccgaaaggccaaagtctgcgatcttcagcgcaaagccctcgtcgagcagcaggttctccggcttgatgtctcggtggtacaccccctgcgcgtggcacgcctcgagcccggccacgagctgctggaagtaggcgcgcgcgatgttctccgagaagcagcccgtgtacatcatgaagtcgaagagctctccgcccgtggccagctccagcacgatgacgatcacctgcttgctgctgccgtccttcttcgggtacggcacgtcgtcgtgcacggacagtagccgcagcacgttgctgtgcgagacgcgcgacatggcctccacctcgcggtacacgttgatcatggccttgcggtgcagcttggccatgtcgatgaccttgagcgccacgcgctggtgcgtcacggtgtccacgcccagcttcaccttgccctggagccccgagcccagcgtctgaagcacctgatactgcgccagcatgcgcggctgctgcgacgacggcgcagcggcggcggcggctgaggtctgttgctgctgcgcggcgtccatgttggcgactggcgccacgggcgcggagaagagcacggacgtcatctcggcctggggttctcttcttccgtgcgggttggcaagtgcgacgtcaacccacgtcagggcgagctgcagcgttttaattggctgaaaaatatcgaaactatacttgtgataacacatattaggaatgacggtacctttaaatgaatgacggtacctccatattattatgtagccttttctgcttgaaggagtccagcgcgatcaatgtcgggcctctcgccggcgccgggcaccaccgccatcatcgttgttagcagctctacggtatagcctatttctttggtgggcgtgccagttgttactcttagactgcacctcgttttcaatgcctcccagctgtggttcgctactaaacgtgaatgttcgacattgttttaccttttgttcatttgcaagctgcaacacccttgaatctcggacagaggtcattgtgtacagtggtgaacttgggcaacggagggaccgatgtcgactggttcgcgagcattacaagcccgcttgatatcgcagtggttttgtagttgcttttgcggtaagaaaaaactagcgctttaaataccaagaaccggcatgccctccggctgtgaaatagtcgcaatatccactcggtatttttccttagcagtgccgacgtaggatgcggagttggcaacaaaatgaagaagtgggactttgctcgagatgcttttgcagcttgtaggaaatgaaaatgctcacctttcctttgtagacaccgtagcccatccacctcaatcaccctctcggctgcaacagcagcactaacgttgcttcctatccaggtatgttctacaaatacatggccttgtatgcttgtaccaacaaatgcacttccagaagaaccttcccgtgatgaagctctacgagtgctcaagtgccctcgctcttttgcgaactgattagtgcactttgagtactcctcaactgatcggtctgctccacgaaacgcccattaactcccttcatctgcgcttaacagcccgcaagttcagtctgcaaagcctgctcttgatggagataatcgttcagggccttgtcaacattcgcatgactgcaattgcggtagtgtcgaacctgaactacgaagtcatgaacgacaggtatgatcaccaacaaaatcacgtacatgtacatgtattgtgaaaaccgattagaatgtctaatggattgttaatccgccgatttagtggcttaataagaccgacgacccccgatttgataaatccgacctcctaattagactgggtacctcgatttatactcaagattactacctaggacgacttaccgagtcagagcatacgagtcggatttacatttgctaaccggccgattaagccagagccggccgatttgcttgctattcagacggaatgtcctatgtgcaaccggcattcgctccttgtaggctaaatacatgtaagtcgccagacaacaatcactacagtcgctcttggctaggtagtcaaggctacaatactaatatcagaactaagcaggaaaagccgcacgctataatacatgtaactgagatatgcaggcgacccgtttaagcgcggtgttgtcgctgcacttggcgagtctcgggtcgagggtacatgtgtggtgtcgagaaagttgagtgaagctcacggcaagacccgcggtgttcggcgtcaactcaactggcggatcgatgcacatcgccattcgttcgatggtgttcgacggccgctgattgggcagtctggacagatgacgatgactcgtcgacactcaagctcaaagccgtggtgtgtccacacgacaccgggacttcaaggacgacccgaacctacggcgagctttggcccgagttccgcacctaaggcgactccgggaggccgtcccagccttcaagagagctcggaagagtcggtggttacctggaagatccaaaacggacacgtctagactagatatttgtattgaaccataggaaagagaagatagaacagataagccctttgggcaacaataacaaaacagcttttcctcccaaccactcaaggaagacgtccgggctatcggtgaggtcccgtagcaattggttaaacctgttggaaggattatgactgtcggtggacgcgcctgctagtatcgtagcgcgcgtttacccgtggtcaggccaagagaagagaagaggtggccgtgtatacgaagggcgaggcgtcgccatgtagtggaggagcgagaccgcactccatttatccttcccgccggagtatagctccggcaccctcgtatcaagccgtgactggctgggacccttccttcctgagggcctgcgaggtttatattgtgtgtgagagcgtgccagtctttgctcgtggctggtgacgctgggttccgtcagctgactaagcggaaacacggtgcacagaggaaacatcaacccggtgcaagggaaagttcctgggccttcaggttctaaccctaacaagcccattgagtcatcgggacttggtgggtgttgttggtggggaaagtgtgctattatataatttagtgcgtgttcctacacgacacatgcatgttgatcgaaattgctaggctgcacataattacgaccgatgagcgatttatactccgattataattgagacatccccgatttattagtcttcaaatccgcttttagcgatgtttaaccggctaattcagcaggacaaaccatgactactgtagtactactgtacatccatctactgcggggatgcactaatacatgcactccctcctgctcagccaggatttttgttttatatttattggtaggcttactgtacatgtacagtaagcctactggtccagtaccgcatttcgcatgtagaccgatacactacatgttataggtttaggtaacaaacagtagattagcccaaaaatgatgtattgcccaaaaccaataaaatgggtttatattttgggttagacaacagcttcctccaggataatgtttgccccaaagtcctgaccttcgtgcacagggcggccttccagcagtgacagcttttctaagtcggcgactaaatcggcagcagcgacgcatgcatcgcttggaagcaggctgctctttcgaaagccgttcgcgattgtttcagctggcagctcgtcccaggcttgacgtacccattcacagatcctggtacggttcggccgcttcagcttgaacttcttcccggagcctctcagtgccttcatttgagcctgcatgtccttgtgtcagcgctggcgtagctgcaccttcagcgggaagttccatgccacgtccgccggctgcgagaccggcgtggcatggggtgggaccttcaacagcactacgttgatcgatgctgcatacaaaagaacgcttgccttccagtgtccactgaaatcgtctcacaagaggaggatgggctctcgggggactcgtgcagcgaaatggtgctttagaaacgcgatggacagctctgcattccaccaccctgtcacataattaatcatttagtaagcgatgagtaacaatggatacaacccaatgataataaagtttcagcatgtacctttggcgttgccgtaaacctcaagccctgtagtttctcgaatcgtgcgcacgtttttccagttgcgaatgccgaatccatagcgacgagcattgttctcctcttggattgcattgtccttggagggtttcaccttaagcacaacaaagggcgtgtagcgattgccatccctgtcaccgagaagcattacggaagcccgctcttttgaagccccgctgcacttgacccacacagtcttctggcctcggcgcgtcaccgtcttcttggctacatattcaaaaaatacagctgccacagagtcggttagctcacgtcacattaataatagtattagcccacacacaacagttacgatacccgtttgatcagcgttatacacacgcttaatgccgaggtttcgcacggttgcgtcgacctctgcggcaaagtcggctgcgatctcgtcgaggttggcggggctaagctggctttgacgcgtgggggttaaacaggtgacggcgcttgaacccagcgacccacttgtcggacgccttgaagtccttgacctctgcctcctccgcgacgtccagcgccttgtctgttagcatttgcgtggagacagggataccgtctccacgcagctcatcgacccactgggcaatctctgcctcattctccgcggacaggattgtagccacccccctgttgcgtaccttcttgtgctctccttttcctgcggcggccggggcttccagcttgttgcgattgcgcgcccagcgtagaattgtcgtgcgtttagagttgtaggcagtagcggcgaggttggggtagaagtgctcgatggtagcgcgcattttgcgcacgacagctaggtagtttatgacggcgagcttcttgatcacgggctccgagttgacctagtactgctgtacatgtctgccgacgcctccgcggcttgatcttccttttgggcgcgcgcgccttttcaaaactgcggctagccttccgtttggcgcgcgcgccatatcaaaacgggtggcagcaacgaaattttgggtcgcaattatcggtataccggtattttggggtgtgtccgtctacatgcgatttcgagtactacactagagtgcatgtgattggttcaattccaagtgtatcccttaagctgctgcagccctctacatgcgaaatgcggtaacgctccatggggtcggagatgttggcatctggaagtgatcggtgcacctcgattgtaaaccttggacctcctgccgcagcttggcaacggcattttggacgacagcttcggccttgagctgcctctcgctgtagcgagcctgtttcacacggcagcgttctcgactggtacatgcaccagtaagcctaccaagaaaaataaaacaaaaaatcctggcttacagggactacgcccccgtgggcgctacagtatcacgaatacttcgaagtataagatgagctaccccatgctgaccgagttttccagagctcatgctattgctaatatatgtaaaatgtacgttgcgaggtatcatctgtgctagataggtctccttacaatttttgtcctcagacattttatcgccgacattagacctgtttagtgcagtaactgtacggtaaagcactttagcgcacttttggggcacatgcatccaactggttttgggcactggtgtgtgaaaaatactttataatagtgcactttaacggactttcgtgcactgcactaaacaggtcaggctgacatattagtccacagtccaaactgtttgcaaagcggaacgttgaagtgcactgtactccaacatgaagcttggtgatgtcgtcaaaagtacttagccattagcaacttgacttcgaactgttaagctagttttgttgatacctcatcgagggtttcactttcgatggatacgttgtctgttcgttgaggaaagtggactcccgtgccaagtgtctctaaaacaccaaatggacgaccagaagacccgatctagtttctggggtacctggaacccgaagcggtggggcaggtaagctcgtgagcttgcgagcatcgaagagggttgcaagtaagacttaccatttttttcctgtgaaagtactattagtatcagaacatagcaaataatatattaatgcaataacattataataatacgtttttattactattgtattggatagtatctttgtatagtagtatttctgttaggcgatttactacaacaaacccaaggagacaatggaaatggtagcgagcgtcgcgcccgccgaggacgccgctgcagcggatgtggagcgccagattgaggagtcagtgctccgcaccgcagagatgtttgcgcttacgaaacgcagcgctgcctcggccttcgactacgcgcccaggtacggccagccagtcactggaacgagtggatacattgccgaactaacttaaatctcctctctgatcgcccccccccgtaaccagcaagaaggtgcgtgtgcggaccaagctgaacaacacatacctgctgaacttcccgaaggcgctgctggagccgaaaaccacggacactgcgactgttgacgtagcccccacagctacagaggtggcaactctagcagctccgggccctgctcctgctccggcggatgtggtggtgggcggccatcaggtgccctcagctcctggagtttcaattgcagaagaggactcgacagcggagaagccgtcgttcgtggaccaggtggcgaaagaggccgaggaggagctggcgctcaagaagcggaagatgtacgtgctgcatgtggtttcgtgcatatttgcgctagttctgagcgagtttccccggtattgcatcaatgtagtgcggcggcgaatgtcaacggagatgcctcctcggcggtcgtagagtacaagaagcaggcagagacggcagctcagttcggcacgagcgccatcgtgcgtcgccgcgcgacggaggtgcccaagcccaagtggcacgcgccgtggaagctgaagcgcgtgatcgctggacacctcggctgggtgcgctcaatttctgtggacccgaccaacgattggttcgtcacgggctcggccgaccgcacaatcaaggtttgggacttggcctcagggcagctgaagcttacgctgacgggccacatcaacgccattcgcggcttggaggtgagcccgcgccacccgtatctcttctctgccggcgaagacaagaaggtgctgtgctgggaccttgagtacaacaaggtgattcggagttaccacggccatttgtccggcgtattctcgctgaaggtgcatccgacgctggacattcttgtcactggcggtcgtgatgccgtcgcccgagtaagtatttagctgcttcgttggagttagaacgcaggcaggtgagtaacaattgttgattctcggcaggtatgggatatgcggaccaagaaccaaatccacgtgctttctggccaccagggtacagtgtgggccatggagacgcaagcgacggacccgcagattatcacgggctctagtgatagcacagtcaaggtacggatatattcacacgagtatcctgtgcctcaaaacggaatatctgacggtgtgggtgctgttttcgttgactagctgtgggatctcgccgctggtaaggtgatgacaacgctgacaaaccacaagaaggctatccgtgccgtcaccaagtctccaatggtaaggcactgttcacctttttgttaaaatctgtaacttgttaagctaaatggctgctcgctctctacaggaccacacgttcatgacgggtgccgctgacaacatgaagaagtgggaggcgaaggaaggccgcttcctgcgcaacttctcgacgcacaacgctatcatcaactcgatttcgatcaaccaggacggcgtcatggcctcgtgcggcgacaacgggtccatgaacttttgggactaccagacgggctactgcttccagagcgactcgaccaaggcgcagcccggttcgctggacagcgagacgggcatcttcgcgtccaccttcgacaagactggcctgtaagtgttgcgcacgtgtttgctggcttgctggcggagcttgtgagcctgacggtgtttccatgctgtgttttttttttttcaggcggttcatcacgtgcgaggcggacaagaccatcaaggtgtggcaggaggacagctccgcgtcggaggagtcgcacccgatcgacatggctcagtggaccaaggacttcacggccccaaagagatactaaaaaggagaatgcttgacaagctgcagtgagctgcctcgcgcataaagcttgtgttaggtttatcaagtttcaagtttaggattccatcgatatacttggcgtttgtatgaaaagatttcccgccaatccgggcttccgtaatattcgcgccattctgaattttaccaaagggattccattgatccgaatcacaatgaccagcgcggcgccgatgaaccccaagaagatgaaggtgagcgagctgcgcctccagctcgagtcgcgcgggctgagctcgaatgggctgaagacggagctgatccagcggctggagctagcgctggacgaggaggagttcggcagcgaggcgcaggagatggaggagctcaaggtgccgagccccaagaagaccaagaagcccgagcccaagaagaaggcggagcccgaggccgaggccgccaagaagaccaaggcgaaggctccctcccctgtgaagaaggcggcgcctgtggccgcggaggagcccgcccccgcccccgtcgagaaggagccgaagaaggacgaagagtccgttcccgctgctgatgctgttgctgcggagcccgtgacggagaagaaagagggggagcaggaggagccggagactggcaaggcaaaggagggagccagcgagccggaggcggatggcgccgcctccaagcccatgacggaggcggagaagcgcgcggctcgtgcggccaagttcggcatccccctgagtctcgaggacaagaaggtggggcagtggtggttggttgacggtcattaagagaggagggagctgacgggtgaatgctatgctactttgtgacgtccaggcccagcgtgcgaagcgtttccacctccccagcgccggtaagtccagtgtctctggtatcatttacacggagagtggctatatgctgacgggtttaattgctgtctgttgtggctgcagtcgcggaggaggagaaggcgaagcgactcaagcgagcggagcgattccacctggagacgaaggatacggtaggtcgacggctggtaccacgacggatgggacccattactgccgcggtggtgctaacgtgacgtgtttgctatctttccgctgcctgtcgctaataccaaaagctcgacaagaagaaggaggcgcgtgccgaacgcttcggcctgaacgccgaagagaagcggcgcctggagcgcgccaagcgcttcaaccttgagaccagcgaagtggtacgttcgtcgttagccccgctcgtcgctgcgtcgcccgagtcataccgacgagtcggcgacgaccaagcagcacccgcactaaccgaaacgcgcatgctgttgcttgcttgcttgtttgcttgttcgcagttcgaggagaagcgacgaaagcgcatggagcgcttcgcggcggccccgaagtgaatgagcgcacctcaccgcccggcggacgcggccagccccgtagagccttaaaagtcccgacgtgccgcgtccccgagatgatccgccaccaacttgagctaggtaggtaccggtagctacactcagtatcaactcatcctccagtttccagtttccagtcgccagccagcagcgccgcagcctcgtgagctgcggcggctgcgctgctatagcctcctcgtacaaatgcaacaaacgatgattcgtgccttcggttcgggtcttctgggccagaagctggttgcagagagctttcgagcacgtccggcgtagcggcaggtgtcgccggtttgttgctgctcgtcgtgtcgacgccagttggctctcctatgtaccgcacaccatgcataagaacgcccgtgattggccggacccgacgatggaggagtcggctaaaaatcctcccctcgtagtcgtcggccacttcaattcctcaattcttcgggcgcgggcagcagcagcaagagcctctgtaagcctccgacctgcgcgtaaatctcgggcccgcttcgccccatccgacgccccattcgacccccgagcgtgtcgcctcagtagcgcgttcttcctccccactccctcctgccgagcgtcatgtccacgccgccgccgatcgcccgccaggcgtccaagtccgacgcggacgtggagctgctgcccgtggaggtgggccagcccgtgtgggtgcccgccaccgccgccgagcgcgtgtgggacaaggccaccgtcatggccatcggcggcctcaaggtgacggtgcgcacccaggccggcaagatccagcaggtggaccgcggccttgcagtgccgctgaacccgcgcgaggccgacgacatgacgtcgctctactacatccacgaggccggcgtgctgcacaacctggaggagcgctgcaagctggacggcggcgacggcacgggccagaagccctacaccttcatggccaacgtgctgatcgccgtgaacccgctgcgcgagctgcccaacccgagcgtcagcgaggtcgtcaacacggccggcagcgcgccgcacccgtactcgatcgccgagatggcctaccagcagatggtctacaactcgggcacggaccagcccacgaaccagtcggtcgtcatcagtggcgagagtggcgccggcaagaccgagtcgtccaagatcgtgctgcgccacctgacgacgcgcggcctgtacggcaagaaggcgcgcggagatgacatcgagaacatgtccaagacccgccagcagcacggcacgtcgctcgaccaccgtctgatcgagcagaacccgatccttgaggccttcggtaacgccaagacgctgcgcaactacaactcgtcgcgtttcggcaagttcatgaaactacagttcacggccgacggcgagttcaagctggccggagcgctcgtggaaacgtacctgctcgagaagtctcgcctcgtctaccaggtggacggcgagcgcaactttcacattttctaccagctgctggccggtgcctcgccccaggcgcgtaaggagttcgagctcacgcaggccgaggacttctgctacctgaaccagagtggctgctacattgccgaggagacggatgaccgcgcgtgcttcgaggccgtggtgcgcggtctcagctgcgtcggcatcgatgagcaggtccagcacgtgatcttctcggtggtcgcgggtctgctgcaccttggtaacattgagtttgacgaagaagatacgcctgagggtgaggccgccgtcatcgagaaggactcggccaagcgcgctatcgtcgcggcatctaggttgctcggtgtgaacgagcaggacctgcggaaggtgattatgacgcgcgacattgtgacgcgtgaggagacgtacaccgttcgccgcaacgagcaggccgccgtgtacgcgcgtgatgccattgccaaggcgctgtacagccgcatgttcgactgggttatcaagcaggtgaactcgtccttgggccacgaccccaacccgctgccgtacattggagtgctcgatatctttggtttcgagtcgttccagcgcaatgacttcgagcagctgcttatcaactacacgaacgaagtgctgcaggctacgttcaacaaccaggtgttcattgctgaaatggagctgtacaagcgcgaaggtatcacggttggccggattaagtggcccgataaccgcgagtgtgtcgaccttattgcgtccaagcccaacggcattctgtctctgctcgatgccgaggctatgaacccgcaacctagcgatgccaagttcctgcgcacgctgcactcgaagcactcgaagcacccgtacttcccgcgcccccacccgaaggacatggagcacatgttcatcgtgaggcactttgctggcgctgtgagctacacgatcggctcgttcatcgacaagaacaacgactccattcctccggatatgtcgaacctcttctcaggatcgtcgaacaagttggttcccgcgttcttcaagcaggaggtggacaccagccgtccgggcaagaggaagctgaccaagagtgtggcggccaagttctcgaaccagatgcaggagctcgtggacacccttgatgcgacgcgatgcaacttcattcgctgtattaagcccaacgcactgatgcgtgtaggcatgttcgacccccgctacgttgttggccagcttcgttgccagggtatcatgcagacggcccaggtgctcaaggttggcctgcccactcgtgtgagctacagcgaactggtgggcgcctacaagaagttcatgccggctgatgctcagcggctgtttgcgaaccagagtgatccaacgctcatcacggccattctgtgggcgttccaggtgccaatggatgcgtacaagttgggtattacgaagctcttctttaaggccggtaagatcgctgtgctggattcgatcttgaagatcaactgggcgacagaaggcccgcacattgtgtcccgcatgaagttgtggctcgcccgtcgccgttggcgtgtgggcctggcgaaggtcatcgcgcagaaccgctttgcgaagctgctgcgccgtatccagttccgccgcaactcattggtgcgtattcagcgctggtggcgtgcttactcggtgcgtcgtgagttccagaagaagcgcaccgctgctgtggtggtgcaagctctgttccgtggtatgacggctcgtcggctgttcaagtccaagaagcaggagatgcttgctcttgcagctgcgcgcgctgctgaagcaaagcgccaagctgaagaggctaagcgccgtgaagaggaagctcgcatggcggctgaaatcgctcgtcgcgaaagcattgctcgcgctgcggccgaagaagaccgtctgcgcatggaagccgaagcccgtgctgcggaggaggaggctattcgattagcgaaggaggctgcggctgctgtcgctgaagccgaggccgctgctgcggaggctactgctgccgtggagcacgagcgccaggcggaactgcgtgctattgcggaggcgaaggagctcgaggagcgtatggagcgcgagcgcgaagaggcagagcgtcgcaaggagcaggcacttctggaggctgccagcgtcagcgcaagtctgctaagcggactggcccaggtgaacagtgtccagacccctgctggccaggtgcacgtggtggagattccggacgacgtctcgcaggagaaccgcgagcagctccaacagctgaacgacctgctcttgagtggtgccatcgcccaggccgagtacgacgaactggtgccgttcctgctggagaagcccgaggaagccccgtcaggcgctgctctcaccgccgagcaggaggagtcgctgagccgtttgtacactacgggtgtgtacggcattcagattcgttgcccggcttgcggtgctaccaacaacacggctaacggcaaccactgtgacgagtgtggctcgctgcttaccacgagtgacgagtcgtctgctgccgctgctgaccccgcgtactacggctaccgtggccagtcccgccagcagagaagcctctcgacactgacagcgcctctgggtacgttctctacggagaacggtcgcatcgtgatccacgatggatacttcgaggcgcagatgcaccgcacgcaggttctgcaggacgacaactacacggaatacacggtctacgtgctgcgctgtcagtggcagccgaaggattcgcacgagtctaccacttggcttgtgtctcaccgcttcagtgtgttcgagaagcttcacaaggacctgaagcgtaagattccgacggcagtggccacgattcctctcttcccgcgcaagcacgtccttggtggcgtgtttaagggcaaaactggcaactcgagcgccattgtggaggagcgcaagcagggtctggagcgatacgtagcgcaggtgctggagctgtgcgcgcgtctccccgagaatttgaacgtgcctgagctggaccgcttcttgaacgtgtcccgccaggttgagcagttccgtcgccaggtcttgtcgaacggaagtgacgagtcgggtgccgccccggccggattcggccgcgcgttgaacgtaaacgctggaggtgccgaaggaatggccgcgcgtgagcaggcgcgcttgcctacggagctgcctacgccgctggatgaggaggagttgtcccacacggagcaggcggtggcgctgctgaacgcgtcgattcgttgcgcgcgtggagatttgcgccgcgatgcgagtgtgcagcaccacctgaaggtgtgcgtacagctcctgccgcgcctgcagatctcggcgaacctggacaacccgttcgcaaacgtggatctgatcccgcgcgcgatgcagtgccaggaagacctagagacaaccatgggcctgtacaacgactcgctgcttgctgtcacagagacgtacgctctctcagcgcaggagggcggtggcgtgcaggcccctcctcctttcgtcccgggacagcagaactcctatcagcccagctacggtgtgtaggcgtcttcggtgaagacgaaccagttacgaaatatggacagcgaagggaaatggccgcacaagttgtgtatcgcttgcccgtgcttgcaactgaagcaagcactacgggttgtaggccgaagagcgcgagtggaagggaacaggcagcaagaagccgttgggagcttgcttggaaacgaagttggcgggctgtgtaagcctaggagggagagcgctggtggttgtttgcatatagctgcatgtttccaatacattgaagatctgaacattgcaactgcagcacgaactcaaaaaagatatattcactagttacaggagaagtagaaggtggcggcgacgcgcttcataggaacttgtgggtcgaaagcccggtctcaacatgtgcgaggaaaatttaagcggcacttgcaggcaccacgttgcgcacgggcatttgagcttggacgtgaggctcgggctgctgcacttgctgggcatgttgaacctgctgctggatcggcgccactcccgacaccgccagcagtgcgtcgttatacattgcaacagcctgctgcaggtcttcctggcactgcatggcacgaggaatcaactcggcatccgcgaacgggttgtccaggtccgccgatcgctgcaaggcaggcgccagctgcacgcacatgtccaagtgatgctggacagtgccgtcgtcacgcacgtcaccgcgcgcgttgcgcaccgcctgagcaagcagtctcactgcaccctccgcttgagcgagctccgttttgtccatgggaggagccgccggctgcgaaggcatcatggccggaccagtgaacgccgggatgggagacgacactgacgtcgccgccgtcgacgttgaagccgccgagcgctgagagccgtccacaggcgagctagcagacacaacaggaggcgcaggacgctgcgagcggaagatctggatctggtgtgaggcgtccaggaactcgtccagctctggggccggctcgccgttgggcaggtgcgcgcacatctcgagcagccgcggcatgtaggtcgccagcccctgcttcctcttctccagcctgtcagtcaggtgatacttggccgggaacggcggcagcgacgccgccgtggagcgcgccagcctcctcttgagcgccttgtgcagccgctcgaactggctgaagcgctgcgatacataccacgtggccaggaggtgctgattgtctccgtcccgaggctgccacgtgcagcacatgacgaagacctggcacgcgctgccgtccgccgtggcgatgagctgcgtggtctccatggagcacgagaagtagccgttcagcagcaacacgcggccgtcttcggcggcgctgaaggccccgctgggcggcgccatggccgtgacaatgggccatctcgatctcgagctcctgcctcttccgctgtagctgccgcgtgcggtcatggccgctgacagctcgtcggccaccgtgagcttcgagctgcatacgtagcagcgcgggccgcgcgccgtgtcgttgctggtgccacatgctggacagcgcagctgcagtccggcgcctacgttggccgcggccacgggcgcgaggatctggtactgcgccgatgcgtcgatgggctcaggcgcgggcggactggtgtcagccgagaagtggacgctgcgctgctgctgctgcggactggcagagtgatggtcctggtcctcttgggcggaggaggctggagggtcgctgggctgttgggcttgggctagggcggcggcgaaggcggcgtcttcttggcgttgcggttgcggctgaggctcttgggacgatgccgttggggacgccacgaacggcagcagctcgtcgtactcctggcgggacagcgagccgctgaccagcgagtcgttcaggtggcggagctgctcgcggcgctcggcgacggacgggtcggccatggctgcagatgaggaagtggaatggctccgaaacgcaggcgagcctctcttcttcttgtgtcgttttggccagagccggcgttggacaactctgctaactgaaccaagatgtcaaatggtggtactatcggcggggcgacgaaaagcatgactttgggctgcagcttcctatctcgttcgggctgcacgcagccccgcgacaaccaccattgctacacgtaacgctatatgcaacgcgcattaagaaaacgcaactttaagtgaggactgcacaccggcgcaacgggtatttgagctcttcagcggcatcgccgccttctagcaatagtaccatcatccggcaaattcccggtctgcgcctgtcacatagtgaacccaagtcacacgctggacttgaagcgcccaaccgaacagaaaagtagctcttgcactgctggaagtgccagcagagctcaactcgacaaagctcggactggcggacgcaacgccgacctgcatcacatcaccgccgccgcgtccgtaatcgagttgtcgtagctcttttgtagccaagtcacggcgatcaagcgcgcgaatgcgtcggccgacagcttccccgcctcctccccgtcggccaccgtgaagtggagcgtcctcgtctcgttggccagcatcaggaacgagttggcgctccagcgacccagcgctccgggcgcgtccacctccacgaacagcgccacaaagtccgtcgatgcaagctccacgctgaacacgacgccattggccgcctcagacttgaccacggatcgagcggtcacctcgccccagcccaggttcaggcgcttgatcggcgcgaacaagtggtgcgtgtcctcgcaggcggtcatctctcccgataaggcgacactcgttgctaccacgcagcggacgtgcaggaagcacgatcggcggtggcaggatgtcgcttcatggtccaaaaaggcgtcgacgtccagctcctcgatggagcggctctcctgcgtattcaccaacaaaagtcagcttgcttttactgaaggaacatatcgtggccaaacgtaccagggctgcgatggggatggcttggcggttgatcgacttcacgaggctaccgcacttggttcgccggagctcgtacccgacgtccaccgtcaaatctgcgttcacgtcgctcacgccgtacacttgcagtgcgttgccgtcgtctcgttcgtggattgatacgatgaaaggagcaaatgcgcgcttcgccgcgtagtgcaagctcttccatcgaccggagtactcgatgctggaccaactgctgccttgccaaatgtcgttcaactgccagtacaaaatgcccatcgtcatgccgagctcgggattcttcccgcggcgccacgtctggatggcagtttgatagcacagcgactgctggatctgcgtcaggtacaaatacgactcgatccgcttgctgatgctgaacccgaaggattcatcgccttcgacacgagccttggattcgtctgcaagccacttttcattgtcaaaggggaacgggacgtgaaagcggcggttgagttgggtaagcatctgcgtggtgccgttttcatgcctctcacggtacttgagaaactgccaaaaggtttgaaaagatccccagtcctcctttgagctcacatcgcgaagagacgttgctgaaggccagctctgaaagccaaactcggaaatgaagcgagcgcgcgggtacatcttgtagtcttggcagtcgctgttgtagtcgtagaagtgaacatcactgcaggacagagagaagtcacgtaggttagctaacgactacttagacaagtcccaagtgcccaagcaattcaaactcacccgaatgctaccccgttcgtggccccccaccgcttgacgtaaggatcaaccgaatacaacccatttgacggagacgtgtcgacgaatggccgagtcgagtccatcgcagcgatggtagggtgaatcatatccacgaagagcttggtgaagtctgctactgcgatatcccgattgaaggtcgtccccggtggaaatatgggagcctcaacgaactgctccatcatgttttcgttctcgttgttcccgccccagatcgcgatgctcgtgtacttacgaagccgggcgacttggaatgccacttccttcagcgcattctcgaggaacgcggtatcacgagggtacatcccgcaagcaaacatgagctcctgccagactaggatacccagccgatcgcactcggaataaaataagtcggattcatatcggccacctccccagacccgaacctgatgaggatcaaaacctttatcagcattttgtcgtcgaggatatgagaaagatattcgagctcgctaaccatgttcatgtttgcagcgtgcacgctctccagcaagtgccgcactgttgacgccctgacccgcgtgggaaacgaatcggtggggatccaattcgcgcctttgacgaagacaggaacgttgttaactttgcagtaaaacgtttttccggtcacgttgccagcattcgtgtcatcctggacgagttccacgtggcggatgccgctcttgtgcgaaagagacgaattgaaccactcgctccaagcatccacacgcatgtcgtacaggtaggcctcgccatacccggcaggccaccacagcctcggattctccagccgaaacctgcatcgacgaacacataagttagctatctaaaatcaaagacgtacatgccacgttgcgctcctcacgatagttctatcaccgcatcttctcccgaatcctcctgcactgtcgtagagagcgtcgcctccttcttctcgtccacaaacaagttgaacgtgacgttctcgtgcctcccatcccctccatctaacgtcacgctgacagtgacatccacaacggaaagatcttccttcccaccagggaacgcttgcatcacgtgcaagtccttcagcttcacgaccgactcctgcagctcaatatacgccggtcctgcgatgcccgacgtcacgtatgccggcccccagtcccatccaaagtccgagccggccttgcggatgaaagaccgacgcgtgggctccgtccacgtattgaagttcagcgtcgccgggacgaagtacgggtactgctcggcctgctgtctggcgtactgcgtcgcaggctcaaacacgacctggacgtggttcacgcccgccaccagcaccgctccgacgtcgagtctgtagggcacaaaggagttggccgtcgtcgccagctgctccccattgactgtcacgcgcgcaacgccgtccaacgtctcgaacacgagcatcgccttggagctgtcggtgtccctgggcagcgtcacgagcgtctcgtacgtccacgtctccatcgccacccactgatactctcgctcattgaagcggtagtacgggtcgtccagcagccccgcggccatgaggtgcacgtgggcggtgcctggcaccgtcgcgttgtccacctgcaccgagccattggccgagcggagcgtccaccgatccagcgggatgacgcggctggtgactgcgctcgagcatagagttgcggctaatactgcaatggaggagaatagttgcaacgccctcatcgccctgcttgcgactggggagattggggactgacaggcaggcagttgacaccatccgatacgcacttcaaccacgcccgatctgtatccatgacgtgggtccgtattgtgtacaccacaccactgatacaagaaagtgtccgctaaaaatacatgtactctgaaaatatttagccagtgtgcggagctcgtcgaggtgctggcagcttgaagcgagtgagtgccgtcgagcgtgcgtggaataagagcgcggcgaagagagaccgaggcgcttagggaacagggagaagacagacagaccgaccgacggccatggcgacgcgagacttgacgcgctcgttcctgcagctgcgcgcggatgagaaggccaaggtgctgcggcgcaagaacatcgtgagccaccgcgaggagggcaatgcgctcatgaagagcgcggagcaggaggccaccagcgtcgccatcgcccccggctgggtggacgtcgtgaacggcaccaaccagcacgtggcgcgcatcaaggagatgagtacgtggcagaagagagaggggcggagaaggcaagagggaggaagactgaccaatgttgcaatgtgttgtgcgtacttgctgcagtggagaagctgaacaagctgcacacgagtcgcctcatggtgcgcttcgacgggtccgagtccaagtacgagcaggagatcgaccacgtcacgcaggagatcacggacgagttccgcagcgccgagaaggggctgcggcggatggctcagagcgacaggaacggcgagttctcggccgcagacgccaagactaggcaaaatgtgcagcggtacgtgggctgctctggtgtggctgtgccagaacatagatcatcatagttgacgctactttgctggatatttatcttctgtttgatgagcagggcattggcgacgcagcttcagacgctgtcgggagacttccgaaaatcgcagaagacgtacctcgcgcgtgtaaagaaccagaaggagggcccggtagagtttgactttctcgcagaaaatgaggccaggcagaaacgacgtggaggggctgatacggtgagttggctgcatgcaacctacgagttgttatcaatgctcaacagtcttaacaccattgtgtgcgatttctccctggtgttgcgtgcttgttgctgctgctgtagggattcactcaggctcagatcacggaggtggaaatcgccgaggacgtcatcaacgagcgcgaccaggagatccagcgcattgccacgtccatcacggagctggctacaatatttaaggagctcgcggtgctcgtgatcgaccagggcacgatcctggaccgcatcgactacaacatggagcaggtggtggagcagacggagaagggcatcgaggagctcgagaaggccgaggagacgcagaagaacagccgccccatgaagtgcatcggcctgctgctcgtcatgatcttcatcatgacagtgctgctcgtgctcaaacactcgtagacacaggtggacacattgcctgtgtggacgtcctccagctaaaaaaaaacacaacccccccgaatctcaatacaattattgtctttccaaaagtttgcaatcctattgtcatattttgctggtcaaagatggacgtcgaggtgaagcagcagcaggcgcttatgctctcgctgcgcgtcttcgtggacgctctgcgggacatcaagaagacggaggacgctgcggacgtccaccgccatgtcgtggaggccgtgcgcgtgctgtgcgcgtcctccgagacgcaggacagcgcccaatggcacgacgaagcgtggcgacgcggcctggtgcccattttccagcaattgtgcctgtgcatgacgcgtctggacgctctcgaggcccaagagaggaagaaaatgggcccgcagacgccccgacaggcggagaagcccaaggcgcccgcgggtctgctgagtctgcgtgactattccgtgctgcaggcggcagtggagctgctcttctgctggggcgcgtaccctcgcgtggctgctggagtgttgatgcccatcgagaagaggaagcctacacgcacgctggagagtaagggggttttactggaggagagacgagatcgacagtgaactgatgtgtggtggtgttttgttgtgttgtgtgtggtgcagtttccaaggacgtgctgatgtggggctatcgcggatataccagagttatggtggacggtcagcggacgagtgaagagacgtcgagcgagctcttgggtatcacgcaggcgttgttgcagctgctgtcgctgccgcagtttcagccgattctgctgcccaagtacgtgatggagttgctagctctgcttgtgtacggagaggtggcgatggatacagagacgccgaggcctgtgcagacggagttcattcgactgagagagatggtgctgcgtgtgctgccgctgaggatgagcatgagtagtctgcgtgcagctctggggcaggctacccctgctgcgagtgaacaggctgtcggtcaacggttcaaggcgcggtgtgggaacttgttgtcacgcttgttaatggaggatggaggcatcgtcgctacaattgagatgttgcttggggctgtggaggagggaaacacgcaagcgagaatgcaggtggccactctcatctgccagtgccccagcggtgaagaccccgagaaatatgcgagggctctgtgcgcacaggttcgcgagttgttactggcagcggtgacacttgaaaagggaagcactaccagcaagctgcttggtgaaatggcagcactgctagcggatcagctcgcgacacgccacccagcactattcgacacgcagatcttgtcgaagctgttccacccgttgttgatttatgaggatagtcggctggatgctgctactccgcccggagagacaaatgaggctgcgttgacgcactgtgtggagattgcgcgactgctcctgtgcggcccaccaccttcgcagcgcttcctgcaggccgttgctccattagtgcgccccctcctccatatgtatgccttcgcggcaacaagcaagagttttctggccacaccgctgcgtgcgcttcttactgcgtggatcagatcgtgctcgagtgcgtccttgctattacaagtggccgtgctacccgtggcattgccacttcagcctacgctgacagcgtgtgggtaccaaagaaagtatgctcaagaatcgtggaggccactacggcagttttgtgctggaggtggtggtgggatttcgcttcgtcttgtccaaccgtctactttatcgatagatgaagaagatgtcaccgactcattgaaaatgctgataatgccgctggtggagctcctgggcgacaaggagctggaaagctcggaagtggtgggcgaccttttctcgtccctcctgctaacatacatgcaagtgcggaagaatggcgggagtgagggccttaatttgatcgacaagagggaagatgctgcatcgcctctggccttgtacgagcctatgaaaagtccgtcaagtgcggaaagtgttgaaatggtactcacactgctgctggcgcttattgagtgcttaggaccatctgtgctgcgcagtgccgctacagtattgcagtgtattggaacagtattagaaacgtacaacacgcctgctacgaagctcgtggataaagagcagcagcaaggaaacattacaccattagaagacgctgaagaagaggaagaagaaggcggcgagatcctgacaatttgcctgggtgtggtaatgaccattctggaagctggatcctctcgtcgtagtgattcggaggagcaacagctccgtgcgatgctacccgtgttggaagtgctgtcgcgtcacccgcgacccgaagttgctgaactgtcgagtaatgcgcgtgcccagattttaagtcgtggcgcgtcggaaaccaatcgaacgagcacaaagagagagggtgagaagagctttgaaggagtgcttcgcgaagctgaacaagatctctcaagcgagttggtaccactacgcgcgcgtggtgttgtcacgctgacaaagctagtgcgacggagtcatgctcatgcgcacgatgcagagtggacacctcgggtgcatgccttagctcgcgtctttcttcttcatctgtacgactccgagagctacgtctttcttgcagccgtacagggtctggctgcgttggcagatgctcaccccgatgttgctatccccgcgttggtgaaggccctgctcgattccagcaactcactcgagtctcgtatcaaacttagcgaggcgctattgttctcagcaaagcgctgcggcgagactctccccaagtacggcaagctgttcgtctatgcgtacttggactgcatccgcccgcctccctcgcagagaaagcgtgtggagcgcatgcaacaagaaacgagcaagcggatccagctcatccaggaggttgaaaacccggccacgaagacacaagaagcagcacagccagccaacgagcccgagagtggtgagcaggaacttcttgcggccgctaccctcagagcaagctgtctgtccaatcttgccgaggtgtgcgcacttttgcagtgggggctccagccgttcctgcttgatgttatgacctgcgtctttggcgtacttcaaatggagctcgagcttgcagccaagccccgaccggccacccacgatgcgacagagacggaagagcagcaaaaactgcggcagcaccaagaagaagagcaacagcagcgcgtggtggccgtgcgtcgcggcgccgtattcgttctgcggtacctcgtggagctgcttgggtggaagatgctggagctcatgccggaccagctctcgccgctgtaccacacgctcaagcacgtggcgcgcgtcgaccgggaccgcgtggtggtgtttcacgcgagccgggcgctgggcgcgctggacgaggtcatgcgcactgagctgttcccgcgcgtggagcagcaagacgcggcgttcggcatctcgagcttacgcattctttagtgcaggctgccaacttcaacgtggcccaaaatactaatcttttcaatgggtaatcattctcttttccaccaatcactgggcgttgcgcctacaacattgttgccgtctccacagcctgcagtctgccgattctgcagggttcagcagggctgctatcaaacatcactgccacggtagagcgcccaacgccgctcaaacccgccgctagggcgatcttcgccgagcgaggcagcctaatttgcaagcatcttctggcaatctgacgctataatccacacgccatggcccagcgctgaagaagccaatcgctgcctcatcagccgtccagtcactgcgtcgtagaagtatctgtcactgatttttgaggctggcgccggtgcggcgtgtgcgtactggactgcacgctgcactgcacctcggccggtagatggaggtgattcatgagaccaatgtctgtcaccgcagcgcctgcgtttggggacaggccgactcgctctccgacgtcaccttagagctgttaactgcggcgccatcaactccgccgttcgtcaatgcgctgcacgtcgatctgacgcttccgtgccctccgtcacgattggctgaaaagtgagccctgtcacacttcaacgtggaatcctcgccgcattgctcgtccgccctcattccccgattgccagtctaccacgcaagcgtcctagggcccagagttgtcatgttccagttcacggcgcctgcactgccgtgtggcggcatccaaaccaaccgatcagcctccgaggtcgagaggttccgcgctcgccatcgccgcctctgtcgcggccagccgcagtctgcagcgctgtcactatcgtccaaggtcgacgctcccgacgaggacgaaggccgcaagcgcaaaatctcggccaattggcgccagaagcagcggcaggatcgactctgcagccagttcgaggacggctactggcccaagtcggccggcaccgagatgcacctgggcttcaacgcctttgacttctcgtcatcgcccgaagccttttgcgacgagccggtagagccggtggaggaaaagaaaccaacttcattatacaagctggaggaggaaccagtggagcttccagctgagtcgtcttctgacggggacaagcaacagaagcagaccatgaccgaggtggccaagcaggtgacggctatgggtttcaacggcgccaatctgtggcagcggaggtttccgggactcggacagcttggtgggccaattcaacaacttccgatgtatggccaaaattctatgtggggaattccggtgcactacgccacgattggcgatcaacgacgagcactttattaccagcccacgttcttcatgtgagagctcgtcgatccaagactctcggttgtcggcgctcgcaaatgtactatagtttatccataagcgttcatgaatggaccatcccctttaggagttgcactgataattcatcttgatgcgtttttggttctaagttattgtcaattctgcccaaattttccaaaagggtgcggtttggctccggtcttgaaatcgagcggcgaatcgaacttcgtcgctaattggtcaatattccctgaagtgcccgagtgcgcactccgcccagtcaatgcaagatggaggaagcggtaacgcgcaccctagcactgtctatcactgcctctacgcgcacatcaagcccggctatactagaagccatcttgcccacgtcttcaataagaccgaacacacgatcggcaattggctgcaagcctactacgagaccggagtgttccagcgtgctcggaccactcgagagaggaagtacacgaagcagcaacgggtgtggctttttaactactaccaacatcatccactctcctacttagatgaagcccaggacgccttcaaacgaactcacggcaccgagatctccaagatatcagtgtggcgaatcattcactcgtttggtctgacgtggaaggtgttggagcggagggcgattcacatcaaggagcaggacgtcttccgtttcgtggaagagcttagtcacctcgactggagccaccacaacctcgttttcctcgatgaggtctcatttgacaacagagggatggttcgcaagcgaggctacgccgtccgagggaaaaaagttgccatccgcggcgacttcgagagaaaacctcgtgtgtcgatcctggcctttattggtgtcaacggcattatcgactacttcagtacggaaggcactttcgatcggctagagttcaccaagtgctgtcaagacctgatgcacatggagagggggccgatacgccagtatcctggaccaaactcaatctggatcatggatggggctacaatccaccgacacccggaaattattcactatctacgaagcgtcggtttagtggtgatcttcttgccagcgtattgtccgttttttaatcctatcgagttcctcttcggatacgtcaagcgctcctttcaacgacagtactcggaagctagcgggcgagatttgactccattcgtcgttcagacgtttcaacgcttcagagatttcgacatgagcaaggtgttcgagcactgcggttggaagaaacaaggctacttcgatcttgttggacatctttcaggtgagaacaaagccgaactcgctgctagttaacgcaaccaagatgaattaaagttttcggaacttgaatcgtaagagtagctaaaactcatcaacatgcaatccttttctttcgtcactcggcgtgctctgtgtcttcgacgttctccatttgaaggagagggtcgatcacttcgtcgcgagcaggaggggtgatgtggtgcagaaaccccatgataacactcttgcgcacctccaaacggcgctcattttcatcgagatactgtccgaaaaattcccacctttggcgcagctgccggtagtcagcaattgtggcctccacaacatctagcgccacatttgccgttcgagtaacttcggccacgtgttggtccatctgtgtatccacgagtcgaagcagattcgcgatatacgctggtggtggttgttgaatagcggcgtcccacgttgacctgttgagattccgcgtgagatggttggcccacagacgccaaacaacaccttcaacttggaatgtagccccccattgctctcgaagtctctccacaacatctcgcaacgaggtctcagcggttgcacccccacgatcggtctcctcaggctgtatgcaggctgcgacgaattcatctcgatcttgagctcttgcgatcgacaaaccatactcgtagataacgagtgtcactgtatgccctcgcattttttgcagccactgcttccacgcttgtgctgacttggtagactccactaccttctttttggccctgaactgcatgacacggtcccactcgcccaccttgtgggtctcgacagaccactcgccgtccgtccgcaccgctctgcacttgacacggccgctgaacaagctccagatcttctgcaggatctcgtcgaacgatccgccattgacaacgacgtcgtcgagagtgtcggccgacgtatcgcgttgggcgatggtcgccttcacgattggctgcaatagcaactggtaccgatgacttggagctgcttggtctgcttctgttgttgcttcgtgcatgctctcaggccggggcagcgacgtgaccactcgcgatgtagctggtgctgctggaggtgccgccaacagaccaacggatcgtgcaggagaagcagtagcgggtgctgccggtgctcgtgtcgctggaagctgctgcggccgaagcgctgctggggtcgcttgtagtggtcgtgttccttgaccactggcgtctgtttgcgatggagatgcgcgtggagccactgtgggctgcgaggtcgacggagagctgcctggcgtcggggtgcggcttcgcaatgggtacggcgagacacgcgtaagaatggcctggcgtggcgacctccgtggcgtggccaccatgatgcaattccagaactgcaaagctgcagcttccggctcccaaaggaaagcctcttatcacgcatatatttcattccttatgttaggttgggcgattggcaggtcggtttcgctggatcgattcaaccaatcgctctcggaaattttgaatcgaacgcacaatacatatattaatacacttttcaaagttgctgtctgtcaaagtcaaagtttgtcaagcagggaagtagtatagctaacaccccctacgaccattctttttgtagacttcagatcgatttttcaaggcacgcgtacaagaaaactgcaagtgttctggaatcaccagtattttgttatcgttagcagtaacccccagcaacgcaaaatttgttcgtcctagaatgtagcatgaatcacgacaacgaggggggagtcaaggtacctcgaatgggaggtcggctctcgcaacattacctgccgcatagggctctaacgagaaacgctggctctgtaacgtagacagcgttacaaccaaaatggcaaaatggcaaaatggtgctcttccagcactacacatacattatcgccatcgacgacgggatccgatagtcgaggttgaagtgagcgcgaacacggcgaacgatagtcaggcccgcccatttctgcccgaaaaatctccaagcgaccctgaacttgcagtgggcgatgctccggagcactcgtgcgctcgtgagctggccccattgccggttatgattgggcacgtgcgactagatgggaagattcctcttgctgctgctgcaacgcctgcgcgatctcaaacgacgacgccactttcggtcgagccgctctgggcagttagaagtagttagttggttagtagctccgcgttcacaacgcaacccaatctccacgatgcagcagcgacttggattgcaatctgccgtcgctctgctggcctgggcagctctcgtactggtgacaaccaccaacgcgcaaacactgcgcaggcctttgtcgccggcggatgaagcagtcatcccggaagtcgacgagacggtgtcgctggcgcagcgcgaggtcttcggcattaccctcgcagcgctggtcatcttcgtcgcagccgggggaggcactggcggtggaggcgtgctggaccccatttacatcttggtgtgcggtctcagcgccaaggtgcgaccagcaagcacacggtggtggacgtcggccgatctgtaaactgactcggattgacgtggcatctcttatcttgcagacagctatccccctttccagcatcacgatccttggaggaggtacgtctcactagaagttagcgtcaagatactgtgatcaatacgactaaagctgtttcctgtgtccgcagcattcggcaactttttcctgaacttgcgccgcacgcgtgacgactcgaccactccgctcatcgactgggatgtcatccttgtgatgcagccgcttctcttgtgtacgcttagtcgcccctttttcaaagacttcctccgtcagcggcgtgagtttggttctgacgacaacttgctctttggtggtgtgctttagtgggggcaacatgcgggacgtacctcaacaccgttctgccaacctggcttctgtgcgtgctgttggtcatcgtactgagtctgacaggcacgcggactctgcagaaagccatcagcgctcgccgaaaagagcgctggcagtgctgcgtttcacccgaagctacagctcttctggggatcgactcgtccgagaaagtttcttcgacacccgagaagaaaccgcaagcggacgtaccatggcggaagcttgccacactttcaagtctcttcgtcgtcatcgctggtatgagaatcctccgcggaggaaaggactttgacagtcccctaggcattgactcgtcgtcagcgctgtacccgatgctcgtggcaatgccctacgtcttcctggttgggatcagctacttttcgctgaaaaacttgggcgctacctacgagaagcagcaaactcccggatacgagctcgaagcgcacgaaatcaaggtacgagcaacgagtatcgcttggttgttggttatggagtctaacttcgtgaaacttttgcagtggacaccattgtctattcggttcttcccctttttctcacttgcggctggagcggtctctggtatgtttggtatcggaggaggcatcattaacgggccgctgctgctcgaggtgggcatcgatgcctcggccgcttcggccatgaccgcaacaaccgtgctcttttccagcgggagtaagttctacacgtatgagactgagtgcgtctgctgtattgctgactgttgttatgtatatttttcaacagtgtcggctttcaattacacggtaatggggaagacggacatccatctagcgcaggttctgctgcccatgggcttcctcatgacctacatcggccagctgtgtctgctcaaggtcgtgcgccgctttcaatgccccagcctaattatcttctcgatggccgtcattgtgctcatcagtgctatcgccatgagtatcgagagtgtccgtgccgtgctagcctgaacaagcggagctccgagtatttactttttcttataaagcaattagcattttcacctcgaccgtcgcgagtaagcaaccgatcctgttcatctagtgtcgtgacgctacgctacgcttcccgcgacgatccctgtgagaagccaatcgcctgataataataccggcgtggtcaccttgcgcaaccaaagccgacgctaatagatcctgcgtcacatgcagcccgccaaagcgtactgtcttcgcgtgcgggacgcaagcgtctctcgaggatggaccaccacatcgtcgaccaatgcacagagttgaaatgcacacgtttcgagctttagtctcagctgtcggtacaccacgttgaagtgcatcttttgaagcatctttcgaaggtatctaataggcatgacgaccatgcaaggtgtgtgcaacgaataggtagcggtctagttgccgcaagttcagtagctgtcactcctcggcacatttgcactccgtccaccctcattttcgatctaggattggcttgctcacgtaattcatcgccctactcgcagccgcaacacgttccagaccatgccacccgtgctctcgtccgataccgttctttacaacgacgaagctaccgacattgagcgcttccgtgctcgtcatcgccggctgtgccgcgactaccaagaaaactcggcgcaaacctctaaacgagtcgagagtgtggacgaagacgatggccgcaaacgcaaaatccccgccaagtggcgtgcgaagcagtgccagacctggaaccagcacgaagacggctactggcccgagtcggccggcaccgagatgcacctcggtttcaacgccttcgacttctcggcgtcgcccgaggccttcaacgacgagccagaggacccgatcgagatcatcgacctgcggtacgacaccttctgtgaagaagatgacctggtgctgtcagttgacagtgatatcccgtcgtacaagaccatcctggatcaccactacgagaccatacccgaggagcccaagcctgcgattgaagctaaaggctcgtcatctataaaggagctgagcatggccgatgtggcgaagcaagtgacatccatgggcttcagcagtgacagcctttgggggtggaaactccctggccttcggcagtccacgcaacagctcccgtctttaaatcgagacggtgtgtggggcggcccaattcaccacgttacgcacagcacgccagaacgagctctttactatcgctactatgcgtgaggtgttgtgcatgctaatgtttagatatcctgtgccgtaccacacttttttgtagtagtaatgaagataccaacatgggctagaatttgcagtagctggctgagagagcaggatccgtagaattcaacgagcatcttctaacaaacaaaccacaaccttgtagctgaaggggcagcaccgattggcttgccacccacaaaggtgtcggtgacaacacattcgctttcaaagtttcctttaggtaaaatttacgcttttggtttatggtacatctgtgaacatgaagctaaggtacaatcacgtggcttgctgcatgcagtccacgcactccttactacgcaaagaactgcggctgaccgtgaagacactggcgctggtcgtcgtgcggggcatacggcatctgcacgggcggccgccacatgcccaggcacggcgagctctgctcccataggctggccgtgttgaagcccatggccgacacctgctgggccacgtgggccatgtgctggcgccgctgctcctcttcctcctcccgctgttgttgttgtagttgttgctgtagccgttgcgcctgctgctctgcggcggcagcttcaacctgccggggctcatcgtggaagaaggcctcgggcgacgccgagaagtcgaaggcgttgaagcccccgtgaagctcagcgtcgtcgacgtcttcgaaaggcccgcggtgcgcagactggtggtggggaatatggtgatggtgatggtgatggtgatggtgctgctgctgttgctgctgctgctggcgccacttggccgagactttgcgtctgcggccgccgtcctcgtccagcgcctccaccctggaggctgcgctgcccaccgcccccggctggtcgcggtgcaggcggcggtggcgcgcgcggaagcgctcgatctcggcggcctcctcgtcgaacttgggcccgccggccgcaggcggcatgaactggaacatgcgacgcaggcttgcgcggcaccgattcgattgtggcgtgttgctccggcgataagaagcgcttggctgaactttcgtgacagagccgtttttcagccaatcacgactcggcaaatcgaaacgtcacgtctgtcgcgattttgttttttgcagggcaagttgcctttttgagcacgagcacattgcagtctcacttaggatactgcacagtctgcccggtgccggcggtgcgcagataaatagacagacaggagcgacttggtcgcgcgcgtgcacggcactgacccgatgggcggacggacacgcgctgcattgcctttgacagcgattccatgtcgtcgtgcacggcctattcgtaatgccaacggagaaaccagcctaaagcgcagtggattcttgcgaccgcggctgcagctattgtgatcggctccgagtggcacacgcgccgcgctgcggtggtgactcggagacctgttcggcggcgattggcctgagccgtcgaagcccggatcgttcatagaaaatgcccggcctagcctgccgtccaaaggatgcttcatcctgcaaaaactcgcagctgggatcgttgttgccggtggagggaggcggtctaaaaaaaagtatcctggcttgcaacaagatctggggtcttaggatctaactcttaggttagattccgctttgcgctgcaggtcatgtccgcgccgaggccataggccttggccggcctgtagccttcgggtctccggggttgcaccgaaatcgcaacgctgaactgccacagtgcccaccgttcaatcagcagcaaacggcatttgctgtccattcttctttcgcttcgtcgatcttgaattgggtgtctgcaatactccctacagcagcaagcacagcaggccactgctataggctcggccctaaggctcagggtctgagccaataatttgttgcggtatctatctggtcggacctcgcagccccaaaaagaagacgctgggccgggggaaccggtgtccggctcgccaccgcgcttccacatgcggcgatcttacagcattgaaccgggcgccacttacttattttttacgcttgaggtgagtgagctcggctgcaacatgaaaccgagcggagctcctggcgatctgttacatgctgtatcgtactaatcattgccttatggtaatcatttgtttcatccaatcaccgatccccgtcacagtcttctccaaatacagtacatgtacatgtaattgtgcggcttgccaaatatcccttaaggcggcacttaatacacaataatggtctggtgtgagttcgcttaggcagttttcgagctcaaacgcgttatttcttggatagaaccagtaatttcacgtggacgcgtgtacactgtaattgctgcttgtatacaacacgtagtatgcaatctggacttctagaacaacgccgtctatagacggcgttgtggctgagtccagatgttcactgtgaacatctggacttctagaacaaattgtctatagacggcgttgtggctgagtaccgatcactgtgaacatactacgtgttgtatacaagcagcaattacagtgtacacgcgtccacgtgaaattactggttctatccaagaaataacgcgtttgagctcgaaaactgcctaagcgaactcacaccagaccattattgtgtattaagtgccgccttaagggatatttggcaagccgcacaattacatgtacatgtactgtatttggagaagactgtgacggggatcggtgattggatgaaacaaatgattaccataaggcaatgattagtacgatacagcatgtaacagatcgccaggagctccgctcggtttcatgttgcagccgagctcactcacctcaagcgtaaaaaataagtaagtggcgcccggttcaatgctgtaagatcgccgcatgtggaagcgcggtggcgagccggacaccggttcccccggcccagcgtcttctttttggggctgcgaggtccgaccagatagataccgcaacaaattattggctcagaccctgagccttagggccgagcctatagcagtggcctgctgtgcttgctgctgtagggagtattgcagacacccaattcaagatcgacgaagcgaaagaagaatggacagcaaatgccgtttgctgctgattgaacggtgggcactgtggcagttcagcgttgcgatttcggtgcaaccccggagacccgaaggctacaggccggccaaggcctatggcctcggcgcggacatgacctgcagcgcaaagcggaatctaacctaagagttagatcctaagaccccagatcttgttgcaagccaggatacttttttttagaccgcctccctccaccggcaacaacgatcccagctgcgagtttttgcaggatgaagcatcctttggacggcaggctaggccgggcattttctatgaacgatccgggcttcgacggctcaggccaatcgccgccgaacaggtctccgagtcaccaccgcagcgcggcgcgtgtgccactcggagccgatcacaatagctgcagccgcggtcgcaagaatccactgcgctttaggctggtttctccgttggcattacgaataggccgtgcacgacgacatggaatcgctgtcaaaggcaatgcagcgcgtgtccgtccgcccatcgggtcagtgccgtgcacgcgcgcgaccaagtcgctcctgtctgtctatttatctgcgcaccgccggcaccgggcagactgtgcagtatcctaagtgagactgcaatgtgctcgtgctcaaaaaggcaacttgccctgcaaaaaacaaaatcgcgacagacgtgacgtttcgatttgccgagtcgtgattggctgaaaaacggctctgtcacgaaagttcagccaagcgcttcttatcgccggagcaacacgccacaatcgaatcggtgccgcgcaagcctgcgtcgcatgttccagttcatgccgcctgcggccggcgggcccaagttcgacgaggaggccgccgagatcgagcgcttccgcgcgcgccaccgccgcctgcaccgcgaccagccgggggcggtgggcagcgcagcctccagggtggaggcgctggacgaggacggcggccgcagacgcaaagtctcggccaagtggcgccagcagcagcagcaacagcagcagcaccatcaccatcaccatcaccatcaccatattccccaccaccagtctgcgcaccgcgggcctttcgaagacgtcgacgacgctgagcttcacgggggcttcaacgccttcgacttctcggcgtcgcccgaggccttcttccacgatgagccccggcaggttgaagctgccgccgcagagcagcaggcgcaacggctacagcaacaactacaacaacaacagcgggaggaggaagaggagcagcggcgccagcacatggcccacgtggcccagcaggtgtcggccatgggcttcaacacggccagcctatgggagcagagctcgccgtgcctgggcatgtggcggccgcccgtgcagatgccgtatgccccgcacgacgaccagcgccagtgtcttcacggtcagccgcagttctttgcgtagtaaggagtgcgtggactgcatgcagcaagccacgtgattgtaccttagcttcatgttcacagatgtaccataaaccaaaattgaaattcaatgaagtaaacaagtctacctacctaaggcgcgttcttaagttccccggagctgggatgcccctcgtccgtcaaacttgataattgtaagcattttttaagcccctaactctcgggaactaccgcgaactacggtgaaagaagaacatggtcagatagccctttcgaaacgtaacaaagtggtgcacacttggcgcgcattagtgaagaaatgaagtacttgcagtagctagggcgaaagtcccacgtcccgaccacgcgaaaatgatgcgggaccgggacaaaacgagctcggaaataaacctagcccgctttctgaaagccaatcaaatccatctatttcgtcccgggacttgggaccgggaactgaaggacggccctaagctacgtccatacggcagtaggattcttggtgccaatgatgcgactcagttcttgctcttgatgcgaacactcgcgtgggctcaatgccagggaacaacacaaaacttcaatcataatcactatcttggtattcaacatgctatgtctctaggttacgagtggagcggtggaaggttaaacgatgcgtgaccagggatgacttccatgttggttcccaggcggtgcgcctggatgaacccggtcgacccggagccctcgagcgagctgaacgtgacctcgcccccgaagtaacgagcaaatagccttgccatgggcagcccatagccacctccgctgaagtgttgcctgtagctgtggtagttattcgagtcgatgggcgggcatggtcgacttgtggtgtagtcatagtgccacagcttattccagcggctgcgaggtacaccgccgccttcatcgctcactttgatagtcaggtcttcactccccacgcagatcacgatctctacaggtgggagtcccttttcaagcttgtacttgctgacgtcagggaagatcttaacgccagatacatcgttcacctacaacgttcaccaacacagagaacatgagtatccatcacacgagtgacatggttgtagccaacgaaaatgtgtagcagcacgcaccgatggaaggaagaaccccaaagacgggctgtccgggttcatcacttgcttgaaatggttcaccgcaccaggcgctttatgcgtcagtttcttgtggtgctccacggttgcacgcatcgcgttcttcacaagttcgaagacctataaacaacgggtcaccgcaagctggttagacgagaggcccagtcatcggagcggccgcggtgggctattgtatcgtaccatgtgatgtaagtgcgagcgcacatacatcagcggcgtactggcactcgctgttgcgtggatctcgaccggcggtgcttcgccgcagtactggacgcacagttgcgtggcacggtcgcacgcctcgcgcacgatctcctcgacgttcacaaggtgcacccgtcctccggggctctcgagcgactcgacatgctggccaatgagcatgcggatcccgatgcgacccaggaagaacttgttcagccggtccttgatatcttcctgcgcactctgcatttgcagcgcgctgtgtccgaggtccgtggccttgagctgctgcagtccgtagcaaatgagcggcacgaggttggagcccctcgctttggcttggcgcagcgtctccgtgaactgccggtcctccgcctgctcacggcaaaagcgcaccccagttagaaatcttaacgccctcctctactacagtagtaaacgactccttacaatggtgctcggtggcttggtcgtgttgatccagttcagctcacgtctgtacacgtcgatggcatcgcggatggacgtcgtgtcgcttagccccagcggcaactccgacagctccacaatggcactgcatagaaacaacagcaagcactctcgagttagcatcacctcgtagccgggtgcagcagcagcagggtcgggacgcaccgcgcgaaccgcgactgcagctccttgtgcaggaacttggctgagacgatacgcagcttggcgccgccgtccgcgaacgtgcgcatctgctgcagcgacagcggcgtgggctccatgtcggcgatctcgcgcacttggtccatgggaatgggcgtctcgtgcctgcagagggggttaccaccgaaataggtcagaaaatggactgctgtgtgtgtgtgggggggggtgcagcacagtacgcacagctcgggggcgaagcggtggatctggatgcagcgggcactttgggcgtggcgcgcgcggcccagcgccgccgcctggagacgcgcggagctgccgccgcggcaccgaagcaggtccatgggggattccgttttgtcggtggcgttaaaactgccgatgtggaagatgccacaacgaggttcagttgtggcatcttccacatcgggaaatcagccacaaagaacgtgggcgcgggatcgaccacaggagcgttcttatcggtaagcgccccacggggcaattcctccaagggggaataatataacaagctaaaaaacaggggcctcattggtggaaaagccacaagaacatgctcaatggacgaccattttgggccgacacgcgggtttacttactgtacagcacagcacagcatgggttctcgttgctacaggtgctgcctccattcaggcttggccagggcaattggggccctcaacggctttggcaccgacgctgctgccgagattggtcgtcttggcctagtagacacgcgggcatcgaccgccgaaacgcaagcgcccagcctccaggctctggtctgagagaccaagctccgggccagcgcattgccgtcgagagggcagcatgcactgcacactacatgccggtgtcgtagttgccgagagccccgcgcccgtcgacgtcgtcatggggcgcggcttatcttcaacgtggaagttgccttccggtggtcggcacagcacgcgacgatcgcttgctcggcgatccgaagccatagcaatcaaccgactcgctcgctgcttgtattaacttgttcgagttgctacgcattgtacatggatccctagactacaatacaacatgggctctcatagcttccgagcctcaagacaccttacgcagcaagacggtcggcctcccagtcggccacggcctgcattcggcgccggagcgggacgaccgactccgtgttggtccccaggcggtgcgcgtggatgaagcccgtcgtccccactccttcctgcgagctcagcgcgatgtcgccgccaaagtagcgcgcgaacagcctcgccatcggcagcccgtagccgcccccgctgaactgctcgcgatacgtcgggtacttctccgggtcgaccggcggatacagcgcgctcgtggtgtagtcgtagtgccagagcttgttccagcggctgcgcgggatgcctccgccctggtcggtcaccctcaccgtcaggtcctccttgccctggcagatgacaaccttcactggtggcaattccccgtccgcgggcagttcgcaggcgtctctgaagatcttgaccccggcaacgtcttgcacggctgggaggaagaagcccagtgacggactcttggggttcatcacgcgctcgacaacacccttcacctgtttgcggcttggcttcgctcgagagcggtggtgctccacggtcgcgcgcatcgagttcttgacgagctcgaacaccatgtggtgcaggtgcgacttgacgtacatgaagggcatgtcggcgctaggcgtcacgtggatctcaacgcgcggggcctcgccgcagtactcaacacacagcctctgcgcacggtcgcagacctcgcggacgatctgctcgacattgacacggtggacgcggccgccaggctgctccagggactcgacatagtgtccgacaagcatccggatgccgatgcggcccatgaagaacttgtccagtcgatccgtgatgtcttcctggacgctctcgagttgcagagccccgaagtcgaggtccttggccttgagctgctgcagcgcgtagcagatgagcggcacgaggttggagccccgcagtttggcctggcgcaggttctctgtgaactggcgatcctcgctctgttcacagcaagcacagttgccgcagttaggctatcgatctcgatatgggcacagctgctccgcaaggccgccttacaatggtggtagggggctttgtcgtgttgatccagtgcagctcctggcggtagacgccgatggcctgctgaacggctgccgtgttgctcagtcctaacggcaggtccgacagctccatgatcgctctgaacaaggccataggaagctcatgagactctctacatctgtatcttcctcgtttactctacgttgcactactccggcgaccgactcaccgagcgaatcgggactgcagctcctggtgtaggaactgggccgacatgaggcgcactttggcgccagcgtccgcgaacgtccgcatctggcgcagcgacagaggccgcggctcggtggcggcaatctcgcgcacttggtccattgtgatggcggcctcctcgagcttgtggctcacggcgtgtgcgtgcagcgcgacgccgcagtggtgtgcgctggcggtcttggcgaccaggaccagcacgcgcaacaggttctgcggggtggccccgcgtcgcacgatctccattactgttgggaatccttcttcacgcgtacggattgcgtgctcgagcgcgatttgggaagtgaggctgtgtgcgaagctctcggcgccccacaggtgctcgcgaatactcgtggcgaccacgctcgcgatcgaacttgcgtttctcgttttataccggatacagcttgtctttgcatacagttaacttcaacgccggcaacttttgccggtggtgccgatggcttcacaacgtcgtgatcggcgtgacaagcatggacctgcagtgacgaacttcggctagagtactctcgggggagtctgccccttgtgcgtcgcgccaatactgaattcttcgctggagtacattaaccatctcgagatggacagcttggctcgaatgggtaagtactgtccgcgtatccaataacgtcgggaagagccagacttcgagcgcgagcaggttcacgttaaatggcagggcttctcggcgtgaatacccgccagattacccgtcgacgtcgacgccactgcagtaaaatcacgcttgaacatgttgcatgtattcgtgttgcagttgaagtttacaattgggcacccgagaatgcaatacttattgtgagaaccggctaaaacgcccatttgtagcaaccccttattagattgcataattaatcagagtacaaataagggctgaaatcgatcgtgatctggatccatcgcttggctgctcgattgcccagtataaggtgggcgttctgctccaagcgcggctatatcgactcccataaaacgatcgtctaatctgcacatccactcacatatcgcggccgttccgacatccctacatattccgacaaataggacacatacctaaattattaaccaaatgtaggttgttctctccaaaatacaacagcggtgaaaatggcgatggtgttgaacacaagcacaagcagctataataatactaagtgtagtagaagaaatcaaagagtctaagaatggttacatatattagtgcagtccgtcaccttctaagatgctgtacctcggcaatcatgccggttgttgcagcacgcgtagtctaacgtcctgccactcctgtccatctcattcgaattcaccagcctcgaacgcgggcccaccagcgaggtcatgacggtgttgctgggggccttgggctgcatcttatccgtggcagtgacgcgcatgtggaaacccagcacaggtccgccgctttcaccggcgttggtgggccacttgctgcatgtagcctgacagacgccccgcttttttaacttgctcaacgtgcggtcctgtaaccacgcacacccgcccaccttcttgcccttggccttggtcgtctcgctgccggtcgtgtccacggtcacgaggaccaccttgcaattgacggcgacgatcttgggacgcatgacagccgcacgagcagtaggacttgccgaagcatcaggagtagtagccctcgacggaggcggagtcgtggacgctgtgtcggtgaccttgttgttggccgccaccgcagctgacctgctggccgagctgcccttggtgcacagcgcatccgctcaccaggcagccttcttcagctctactcgctcttgatcatctcgccgtcgcgcagttctcgccgatgtagttccctcgtgcagcagctccacggtgctgttcgccgcgtgcacgcgcaccaccttcgcgaagcgcgccgcggcctcaaaggcacggcatgctccagcccacgacgggtgcttgagacgtcatgctgccgaatgtcctcgaacgcgtgcgcggtggcgacggcgttgcgcgagagccccacttccccgcttgccgtcgtggtcacgatcgtgcccttggccgcgcctgcgtcgcgtgtgccttgcctggacttggtcacttggtcgccatgttccgaatcttgagatgacagatgaccaatcaaaccttttgaactcaaacctcccgtcctactttaggatacatcctacttgtcagaatggcaaaaatatttgaaaaatatgtttgctacttgacttttgtaaacacatatacatatttaggccagccttccgacaaatatttgtcggaaagtgtcggaacgcgttcatataaccctaacgtattgcattggataaaatatccacaccaggcaaaatgataggctgtaattcgggtggagatcagccataagttatcagtcggaaagaccactatattcatccatatgcatcgcaggacgcgatcgaattacaaatcgatcgagctaaatcagagtctaattaatcgatttacgagcaaaataggcaaataaagcagttttcacaatagattaaaccttctaaactgcaggcaaaattaatcattgcatttcagtgacacctccttaaatgaacccctctaactgaccatgtgttccctatctggttaggattcctcgactgcaaacgggattatatagatttcactataggtgttctataactgatcaaaaacctctttattctctaaatggtcgccattgttggcgctaaatggacgccgtagtaatagatccaaactcatatatttttctcaatcacttgcctgcctcctcccacgtatgtcattgctaccactactcccgccataacaaatcgagcgaagagagaaattgtatttggatgctacaaagagtttgcagaaactgcaagcttgtcataaagaagttagccacagtattttacaatcagcgcagcgtacatatatattttacgaaaaactaaaatattatgatgtcgagacgactaggggctatgcagtagataccaagcaaaagataaaactgcaggcatggtggcaggatatcgggacaacaaatattcctataacctcactgtattgaaactcacgtacaacctgaggggatgcgattctgctaataccaatgagaagaaggagtaggaacagacaataccgcgcctaccgttattagttgagttctgattgtgtgaagaccaaacaaaacaagagtacgaaaatgctggaggggtaccaggtaaagaaagcccttgtgcacctaacatatgaaaatgtagccattagaagtgtagacatttctttatctgctcaattctttaactgaaacagcatcttagaccgaccgaactgggtgtcatttatagaggtgtgactgtattgccattaattactgccaattcgtgcacgaacctgctccaccgtgttgacgtcccacaagtcgcggttgtactgcagacacatcagcatttcgagcatggtgggggagagactcttccgcacgtctgtgagcaccagcttcgccgccgaaaaaagcgctcgcattcgttggacgtcggcggcgcgtaggcgacgtccacgaaatgcgagcgcctcggtgtcttcctcttcttgaatgccgccttgacgatagagctgttgccgtcctcctgcgctggcgccctttcaagggtcgtcgatctaaactcggcacacgccgaccgttccgcggccatcaacgactctccgcgctgacttgacgaggcccagttctaaatgcggggttgatgacgatcggagccgttgtgaccagtcgtgcttgagtgcagggtactccttcacgacctggtcgaaaagacggtgcacagtagataaagttagcgtagacctctgtagctctttcgtgacgccctcgaacttcaccaggtccttctccaacgccttgactcgctcgtgctcggcgcgccgcagcaaaagcggctgtacttcgtacttgaccagaaggtcatggcccagcttgattatggtggctggagcttcacatagcgcgtcaccatctcgtacgtgctcgaccacctggtgtcgttcctcaacagaggcgacagatgggagacgcggcgaagcagagcgcggcccttgatcgttcggagcttggccatcagcgcgtgcaccttcgcaatgagctcgtcctcggtcttgaggaagtccttcaccaccaaattgaatctgtggctagcacatccaatgaaggggatagccccttccttccggccgatgcattggttcacagagcagttgtcactcaccatgaccttcaccgcgctctagggcttgttataacgagactgcatgtcggcgatcaggtcgtactgactctgcgcacccgtgtcttcctcgaactctactggagcgaatgttaaaaacaggaagcggcgcgatgagcactcgcgaccgtcatagtactcggtatcagcgccgtcaccggtaataccggtactgtcgctgccgaataccgcgaatatcgcgatgtagtgacgaccaccacgtatcctcccgtccagaacgaggccgaacgatgcaaggagctcgcgagcgacgcgcagctctagcagctcgaaaatcagcacgatgtacttggagagggtacgagagagagagggaggcgttgaggcgcgtgatccgccgctctacgaacgcaaacgggaggcggtccccgatgacccactcgaaccagcgatataggtatgctgacgaggtgtaggcgcagcgggttctggcggcgtgaagcctcctgggcctcttgctcgtacttatcgtggttgtgccgcaggtcgttcagcaggttcgtgtagccattgaccttcttgtacggtttgtcgcacgatgttcacttgtagaagctgttgccgacatcagtgaaaagcatggagcagatttggctgctcgtgaggaccatggtggacacgtggggcgaagagcttgggcggtgacgggtgaagaaagcaaatttgattttgatggagactccgctgcgagtggtgtggtgaagtggtgacagatcgacgagtggttggtggtggactcttcggtggacactggtggctgcagcgagcttcatttgagcaattcaagtacgaaatgtgtgcaaatcaaaaattaagtgagggactaaaataaatcattgaactaagtattcgaatgtatttttatgagtattattttttcgggtgccctggtttacaagctgcaccccggactcccgtttcgttggtacttgagcttcaacccgactgctttggctcgcgaaatttccacgatgcagtagtgcatgtagagatagaacccaccgagcgaggtcgtgtcggagccagtacagctacgtggtgtacgatagagtcgatgaggaagggggattgaagatacattccaagttcaaaaccaaaatatcaaggcaggaaaattgataccgtgttggctggcttgcttccctctaagctaacagtcttactcaaattgatgttacacgcagcgagctgcaaccgcttggctttagttgctacattgaaccatgactgggtcgacgtgctgctgcatgcttccaaacaaattactccgagttcttgaaacgtcgggcaaccttgtgtcgtgtaccgctgtgttactggatcatatcgggcctgggggatatggttcatgctagctccgcccagctcgtttgcccactatcggtttgtacgcatttgtgggagctttgtatcggtcaaacttgcaccagcggagcttgcctttgctgttttgcaagccgacaaagacgctcgttcaaactggtcagaagctgatcactccacccttggacaatatcgcgttgcgttcaacttagccgcggtctttgattcaatggattgttgttgctgccaaagtcgacgaagtaccatgcaccagctgggccgagggacacgacaaatctgggtggcaagccacaccaacggaagtcgtcgcgggctgaggattcgttcgcttgggcttgctgaatctcggtacctggttgtgctcgtagagacacgcgtcctgcgtgttctccaagcagccgccgccactctagttcatttctcatttcacgctgctcgtcatcgccgaaccaattttgcaagaacgaacgacattgaggaatcgaggccaaaaacctaaaaacctgttgtcgcgcaacaggtgacagctcgatgcacgcatactaagcgagatggcttcaagatcgctctcgcagcttcgttgctttcagtaatcgaggccctgtgactgagcaatcgacgcggagcaggggcatcccggccacatagactccaaagtggcagtcaagctgcgagcccatgctgaccgcatacgaccgagcgtctcggccatgagcaagcgagccgcagtgccaaagccgagccggcccgttaataagcgctgagacggcagcgaagaccgcgtggatcttgcacaggaattaaaatacgggcaaacgtctgctctgccaacgagcccaacgtcgtccaagcaaataaacggccaccagctaaattgagcgcaggatcctcgcaccaggcgctgaggttggcgagatccaccgttacgacgagagtggcgcgcagaaaattctccttgtcaaacgacatggtggtctacgctttgcatgagcgtgacgcgcgtgttcttgtggccccgggggccccgagtcgcataagtcgtaccgtatccctgtccaaatcgcaacgaataaatatcctttaatatacgatatgcacattcgtgggcgtagaaactaataaatacctattagaatggataccccgactaatcacgccttagctgatattatgctacattcagcgcgctctgaagcgacaataatagtcggatagaaacgcacagagaccaagcagaagctgaactttgcctaggtatccgcttgctaaacggccgctgggacctatcctccggttgctggcagatttcaatttgctctcaatccaccactacaacacagcatggaactcgtgcggtgcggtgccaacccccatctgctcacgggcgcgctctgcgccgtggccaagaccgtcgtcgcacgccacggcgctgcgcggctgcacatggacgccttccggccggacttcgaggccagcgccatctccatggacgaggtgcgcgagatcgccgacaaggagcccacgcccatgtccctgcagcagatgcgcaccttcgccgacggcagcatgaagctgcacgttctgtcggccaagttcgtgcacaaggagctccagtcccgctacgcgcgcgccatcatggagctgtccgacctgcctgtgggcctgagcgacaccacgtcggtgcgccacgccatcaacttctaccgctacgagctgcagagcattaaccgcatgaagtcgcccaccaacgccgccgaggacctcgtgttcaccgagaagatccgcaacgccaaggagcgcggctccaacctcgtgccgctcatctgctacggcctgcaggagctcaaggcaacggacctcggccagagcgcgctgcagctcgagaccgtgcaggaggacatctcctcccgcctggacaagtttttcctcggccgcatcggcatccgcatgatcatcggacaccacgtcgagtcgctggagcacacgggcggccgcgtccacctcgtcaacgcagagcaggtcgtgcgtgacgcgtgcgagcgcgcgcggaggctctgcatccagtactgcggcgtggcgccgcccgtgcagatccgggctacgcccagcgccaacatgcccttcatgtacgtcgagtcgcacctgcaccacatggtgtttgagctcgtcaagaactcgatgcgcgccaccgtggagcaccaccgctcccgttcgcagccccagccccgcggcaaagtgaaccgcttcgagcgcgtgatgaacccgaagagtccgtcgctgggcttctacatcccgtccgtgcaagacgttgcaggggtcaagatctacccggacgtgagcaagtacagcgccggcgacgacttccctcccgttgagatcgtgatctgccagggcagcgaagacctgaccgtcaaggtgagcgacgagggcggaggtgtgcctcgcagccgctggaacaagctctggcactacgactacacctcgagtcctctgtgcccgcccatcgactcggacaactacccgacgtaccacgaacacttcagtggcggcggctatggtatgccaatggcacgattgttcgctcggtacttcggcggtgaagttgtcttcagctcgcaggaggggtccggctcgacggcgttcatccaggcacaccgactggggacgaacatggagttggttcctcttcgaaggcagatgcagacggcaacgtcgccccctccgcactggcaactgcgccgttgtgcatacgcatagagaagcagtacagttgttcacttcattttattttatttatcgaatcaatggataagtagactatggcatcctggaaattagtcttttgaatcatgacaacaatgatgaaaagaccaaagcaacctcgagcttgtccagcaattgtaacgaagtcgaacaaaagacccgccactacgagtcattcttaaaccactgtcgagaatttgacgcttctcctcgtaagttttcggctcgaagccgagcttgatggtggatagtagcgggttgttgatccactgacgttcgagacggaccgggcgtcttgcgggagcgtcgtgttcaccgactcaagcgtacacgataaccaagtacgttccggttcacggaatgtattcgttttcatctgagcctcacttcaggctgccgcgacaacacggcttacactgcgtgctgcttgatcgggtcccacgcagtcacgaagtacgtgtccaacccattcaacttctcgacctgttcgctcgtgagctccagcttggccgcctccaagttcttcttgatcctcgactcggtcaccgacttgggcagcgtcacgaagcccttggccaggctccaggcgatcagcacctgcgcagacgtcgcccccgcctcgcttgcaatctgcttgagcgtgcggtcgtgcatcttctgggcgcgggccaggggcgagtacgcctccatgatgatcccctgctcctcgcagtacttgaccgtgtcggcgcgcgcgagccacgggtgcagctccacctggttcacggcgggcttgacgcgccatgtctgggcgagcttctgcagatgcagctcgccaaagttggacacgccgatgtcgcgcacgacgccctcggtctgcatgtcttccagggccctccaggcctcggcgcgcgtggcgccgtcaaagggggcgtgcagcaggtacaggtcgatgtactcgagcccgagcttgcggttgctgagccgcacgccctccaccacctcgtcgtagctccatcggccgcgcggagccacgatcttgctggtcacgaagacctcctggcggggcacgcccgagtcgcggatggccttgcccacgtccgcctcgttgcggtacacggtggccgtgtcgatgtgtcggtagccgagacgcagcgcggccagcacggcgtcgtacgtctcagcgccgggggcgctttggtacacgcccagcgcgacggcggggatcgagtggccgctgggcagcagcttggacttgacgaacgagctcatgcgggtggcagcgctgggggggatgagagactggggaggcctcagcggagaccgtcacgcacgaggatacgtatgcacttgccactatttacgtgacttagttacggtggcgagcgtcaacacggattgaatgagctctgctgggagtgccatggttctctcgagcgcagagcactttgccgagtgagtgcgagtgagtgtggctgggtggatatgcacaagcgcttgcaggccgtcggcgtgcatcacggtagtgttgaccaattaggtcggagacggatggggctgatactgtagtgtagaggggtgttgccactgcttggtcggccagaccgcgatgccaccttgtccgactcccagcatggagtcatgttgaagctgcatgcaagtcgcagcgtggcacctcagcggcgactagcgcacaagatcgaggcgacctgataacaagtgagaccttacttcaatcggacgaggagcgcgtcataccgccggtaggtgtgctcattggccgcgactggatcgaaggcgtacaggagcactgcatcgccggcttctgcatgcgtggagctgtcgccctgtagcttggcctttcattcctcgtcttgcctgtgctgccgctcgtctccttcagctcgtccgggtcaacgtagctaagagacgtagcgccatgccccacgcccaagaactcgacttggagaagagctccgccaactcgtacgtccaattcgataccgatgctgacgtccccgtcgagtacgagaatggcgacacctggtacgcgcgcgcgcaacgctgggccgagaagaactacatggagccgcgcagtatcgagcgcgtgccggaggacgagcgccacgacacgtcgctgatcaacgtgtgcacgatgtggctgtccccgaacatggtcatgggccacttcgctgtcggcattctcggcaaggccatctacggaatgggggtcgtcgactcgatgctggtcatcctattcgccaacctgctgggcgtcctccccgtgtgcttcttctcgtgctttgggcccgtgtttggcctgcgtcaaatggttctcagccggttctggttcggcgcgtacggcatccgcctcgtgtccgcaatcgcctgtgtttcggggctcggctgggcgacggtgaacgtgattgtcggcgcggagctcatccacgcggtcaacaccgacgtccccgcctgggctgggatcatcatcatcgccttctgcaccttcctcatcacgctcttcggatacaaggtcgtgcactactatgagcggtactcgtggatccccaacttcatcgtgtacttgatcctgctgggcacgttcatccactcgggagcatatgtccacattccaatgggatccggcagtgctgaagtctctggcgtgttgagcttcttctcggttgtcttctgcacagctatcagttggagcaccatggctgcggactacacggtgtaccatcctccgaaggagagcaagcgcaagattttcttcgcgacgtggctgggattgatcttcccgtcagtcttcacctagtggatctctgtcatcgtcatgtcagccacgggtctcgaccccaatgccaccgacaacatttacctgaacggctacaacgactcgggcgctggaggtttgatcggtgcagttctcattccccacctaggagacttcggtcgcttttgtctcgtgatcatggcgctgtcgactgtcgccaacaactgcccgaacgtgtactcgttcacgctcaacatcaaggtcatcggacgctggacccgcttggttcctcgtttcatctgggcgctcatcgctgcagtcgtgtactccatcatcgccattgaggggtactcgcacttcggtccgtgctcaacaacttcatgaacttcatcgcgtactgggcgtactgggccacgatttactcgtccgtggcgctgaccgaccacttcgtatttcgacgcggattcgacggctaccatgttgacgattgcaacaagcccgagaagctcccgatcggcttcgcggccatcttttccttcttgtgtggctgcgctggcgtggcgcttggtatgagccagacttggtttacaggccctctcgcgagtcatgacgacattggcttcgagctgggctgcatcttcaccgttgtggccttactgctttcaagacctgtcgagaaacgaatcttcaagcggtaagtattgaagaactaatgttgaggggggaactaaaccagcataactgaagtgtccacgtatcaatccatcgaaatacacacataccacggagatgcaatggactccataattgcgtccggcattgtaggtactcgtcgagcacccacaatgcgctgctcggtgctgcgggcctgggctcgtgctcattctccaaaaagccaccaatgacgcactggaggcgcctcaagcaacgcatcacgccgcactgggtgaggtgcggtcactcaccttcatcgtcctcgacgacgatcgtgcctgtcttcgcgtgcgctgttggctcggacgtgcgaaggagcccgtgatcatgcgcactgtcagcctcctgacatcgcagccaccctcccgacgctgctggagtgcatccagcagctggtgcagtttgtgcaggacgagcatgagtagttcctcgccgtccgagccctggagcgtcgcgagcgagaagaccgccggcagcaagtccagcaacgaggccaagagcaactcgacgcagtgcgcgaggagcaggatcgagtgagagaggtcactttcgactgggcggtgctactggacgtactgagccatttggtcgcgcactcgctactgggctcgttccaggcgttcgccccgctctcacagcgcctgagcgcggagacgcagcagagcatggacgccatattcggtgaccagtatcgcgcggtgctacagcgcggggaactcctggggatcgacgcggcggcgctgcagcccagctcgcgctttcggtcctgggctgcgatggtccagtggagcaacgttcgccccattgagaacacgcgacaagacgtccgccagcgtctcaaccgtgctgactgcgttgatcctcaaacgcagcagcgcaagattgacgcgtacaacacgcgtgtgcagcgcaagcagcgcgaaaaggaacttcgagcccggatgaaaactgtgagcgcgcgtttgaagacatcgcgcgtgacgcgtccacaggagcgcgctctcgagcaggaggagaagtcccagctcaaggacgagctggagctgctcgagggcgaggatgcgttgctcatcaggcgcgtccgccagtatcgactgaagccgacgcttgagcaggcccggcagctcaagaaaacaatggacgcgtgccggtacacgcacaacaagtgcgtcgagtaccggcgcaagggtggtgatggaggcgagaacaagctccagaagctcttcgtggcgcggcccaggcagcgccaagtcccgctggagtacccggaagacatagggccggcccccgagtgggtgctggagacacccgcctcagcacgctgtcagaaactttgtgtccgccaccagcgcggccttcacgaacctggcgcgcggccacatcacccacttcaacatgcacttcaagtccagacgggagagcaactacttcacaatatacgcagacgcggaggcgactcacctcaactcagcacgacaccgcaggggcacgcggcactttggtccagcgccccttccccgggaccgcaagcctaagaaggtggatcagtacctaacgatccccccgtacccaacatcctcatcagagcggacgagggcacggagatcgagggcgaggtgcgcatcgtgtacgcacacggatactggtacgcccagatgccgcacgtggtcgctccactgcccgtggaggacacagggcgctgcacagcgggggacccgggtctcaaggggttcctgaccacgatggacctgcagggcaacatcgcccaccttggccgcgccaactgggatcgactgttgaagctgaagacccgccagcgagcggcccaacgccgaatgagcaggttcgtggcgaacaagaagtaccgcaagcgccaccacctcggccgccacacaggccgagagtggaagcagttcgtggcagctcgccgcgagttctacaccgtgacggtcaagctggacaactacgtgaaggaccttcattacaaggcagtttcacacctgtgccacaacacggacgtgatactgctgcccaaattctcgacttcgtccatgttgcgcccaagtgccccgtggacgcacgcgttcaacgaccagatgaacacgctggtccactaccagttccggcagagactgctggcgaagtgcgaggtggcgggcaaggccatggtgctgtgctctgagatgtactcgagccgcacctgtggccgctgctgccgcctccacctcacactgcgcaacgaagatgtattccggtgcccccactgcggcttcctggctggacgagacgagaacgcggcctacaacattctgcggttcgtgtgcgcgggctctctctcggtttacgcagtgaatggtgtagtgcagttgtagtgggtagtggttacagcgagcatggccccgccgatgagaagcgctaggcttggcggggtgacagactgtaacacattattatgaggggaattattgaaatcaccatatattattaggacttaccgctcgctagtcgtcattctgcgggctacttggccatcgtcacgaggagcccgtcttgctggtagaacaggcgagtggtgtagtccccgatggatgcgccaatggtgccattgactcgcatcagcaggccgcccgtcaaagaatggataatcgtcgcaatagcctccgggctcaagaagctctgcacgtcggcactcatgcactggccaaccgatgcccgcggacacagtgacacatgctcatcgcagtgagagccttggcagcaagagaagcagccgcgagtgtttgcagggatgaatatcggctggaatactgctggagaaaacctagctagagattcggcgtagtacttcttgcactccagcttcccatggtcgcctaacatggcatacaaaagtaaagtaagaagcagtatcatgaacgatatcgcaaatgagttcacacacctgccacctggtcttcgcaaggatacagctcgagatccaccgtggtcacagtaatactctcgctgaatggattacgcagctcgagagacgttggaatccgtgtcagatggaaaatcgacggaatatacaacaacgacgaagtgacaagggttggtgtcgcggggaaaagctcagccagagttgacaacttcgacggaatcgaaagagcttccatcgctggctggagtaaatccagcgaagtactctcctctgaccccttgatagcaatctaaccgaacaacaacaatacatagtatgatgtcagtccacatacctcgaccaaacaccacgaaggattgacgataaagtacctcctgggcagctccatgcgtgaagtacccacagacgaaattggacagaaatctctctgcagtcgcacggtcgctcgcctgcgggttgtactcgaaccttcctcgtagaatcgttggttggccgcaacagttgagactaaaatccgagatcttcgcggagcccattcgcgcaccatcgaaaaagacgtccaagacgagtgagcccaactttgtctgtacaatcgacgggttctgcagggaaaactccatcgtcatgaccatggacttctttgaaccttgctcaatgtcgacgctgagaacttttacgggcgggttgcgaaaggaattcatagctgggatcaacggttcgccttcgaccggaatgttgctcaaagctagcattcccatccgagtttccacatctgggaacgctccttgacctgctcgactatcactagccaaacgcatcatgatacttccattgttcgtaagcaaggactcgataaagcctgacatcccaccaacgtcttccttgtcatggaaaccaatcggatagaagtggctcatattcaagcggaatgctccgccctccgactggttgaactcgcaggactctcgggctgataccaacgaaccgaggtgatgaccaatctcattctccagagtcagagcaacagacaagtttgaaattttcaatgggatggcaatagaggctggcatcttcaccttcgctttcatgtcagtgcggacttgcattcgcgtattggtcgtcgggcctctctcaccgggaggagcttcgtccagaatcacatccagctggttcattttgatgtccgaaatcatgtgaaagcccttcgcgacgccggggaagcttgtcccaattgtcaaccccagcagcgcctctttcatccacacgcaatcggcatactgcgtcccagtgatcttcactacaacttgcgagctgttgccctcgagatacctcgagaaaaatcccgccacagcatcgctcacttggccagcagcatccttggttggtttcaagttcccagtcatcttcagcgagtaggttcctggggccaggttcatcgcaccctgtagctctccaaacttttcccgtggcgaattcaggcttaagtccatggtgagtgtgccaatagacaccgtgaacaaagatggattgcggatatcaatatgtgtctccatcggttcttcgtccagagtagcgctaccggttcccggcagagtaaagttcttcaccgtcacatcctggaagttattcattccatccaacagcgcggtggtacgaagaggcagtccatttaacttcaatgttcctgtgtaagtcagacattcagaagaacggcatcagacaatgaagtactcaagtacatcttgtaagtatgaatgatcggcacagcaacgtacctagggctccatgacacacgacatccatactaccagcgagcgttagcgggaccttatccttgacgaccgaggcacggacgaatctgccaaatgctctccctttctctgcgaagtcgagctgcgtcaagcactcgacagaaatgttgcttcggcccactagtcttccattgataatgtcaacagacctagttgacagtgtccccaacgccacgtccgctccattgagagtgacattcatgtgaacgtccgtgatcgtcaacgccgaattggaccccaacggactggtggcctccaccaagacagccgtgtcaagtcgtacgagctcgttagccttgccctcttccggggcgtgcagtgaaatcccgcggaaaaacatgttcccgaccagcgggtctttctgcggcggcagtgagctgtcaatcgtcagattccgcatcgcttggttgtacagcgccaccgacgtcgcctgcgggtcacaagtcacgaccgtaagtgccgccgatacattgctcaagtacttggtaatgagtccactgattgcttccgagttttcccccagcatatcaccctgcagctccagcaaattgtaccccttgctcatatctgccgccccctgcaacgaagcgcagtacggatgagacgcttctccgtccgccaccggtaagctcgtatcctctggcgaccataagtgcgccaccagcgtcccctcccccaccgtcgggtagtgggcattgagacacagcgctccaacgggtctgatcgtcgtgaccgacgggttcctgatgcacgtcttgatactggccagcaccttcttctgggtcgagcggcccatgtccacctgggcgatctgcatgtcccgcagtccgtccatgcccctgaacttcatcaccttcttgagcgggatacccgaggcgctgagcctcacgagaccgcccagcagcctcacgtggatgctcagcgtgctgctgatctcgtactgcacctccggcagcctcatcatgtccccggcgaattggtcccacgcccttttgtcgccaatttccagcgtggaattggggaagttctggtcgttgaccccgtggcggatctccatgctcggggccgcgaacgtccccaccggctgctgcttgtacgcgatggcgaaggtggcggcttccaccgtggccgggaatggggacgccgccagcagactcagactcagattgagagccaccgagctggcgccggggcggctcagatccatgcgctccacgtgcatgaccgtgtccttgatggccttggtggccacgcgctggatctggctcgacacgaccgcgtacgccagcgcgcccagcagcagcacggcgcccgcgacggcggccaggcggcggcggtaccagggcgtgcggcccgcgcgcttgccgtcgccgctgtacgcgccctcgtgcggccccagcagcggctgctgcgctgccaagcgctcgtccagatccagctccagctcgtcgtggtccatggctcggttggtcatttatcttcaactgacctgggaattttgatgggggaaacggtactgtcatgtgtcataaattgaaaacatgatatgctcttaggtaggattagtgtttgagattatcatttgtcaaaatgcgggccaaggtggagggcgacgcggccaaggaggccaaggaggtgaaggccgagagcgagggcccgggcttccccgtggggaccacgctggtggcgcgctggatgggcaagacggagcgcacgtgcgtcgtcatcgatcggagtgcgtggcgccgcagatgccgcctccggagcgaatcgtgacaaaagttggtactaatgcctttttgaccctacagcggcgctgagcaacgaccggttcaagtattacgtgcactggcatgatgtacgggccctttgcagcaaaagttgtattagtaccaactattgacattctctctgttgccgagtccagtttaaccgccgcatggatgagtggatcaacgagcacgagattgtgcgccgcggcaccgacgaggagacgctcaagctgcaggagaaggacgccaaggagaaggagaaggagcagcgcgccaagagccgcagcagcagcaaggcggccgggtccgacaagaaagactcggctgctgcaggtggtgctgctggagctgctgctggagctgctgctggagctggagccgatgcctcggcccgcacgcgcggccagaagcgcaagacgccggacgaccaggagttcgcgccgccagaggagcacgatgagcacgaaggcatggacgcggccagtatccgcgagcacgaggaggtcaccaaagtcaaggtgagcaggtgcagttttctattggatgttgaagttttgtgattctaagttgtgtgtgggtgtgttttctgggttgggtagaacgtgcgatttgtggaaatggggcgctttcggatggcagcctggtacttttcgccattccccaaggaatacttcccggatggctcaattgactgtgtgagttgctacaaatgacatacaatgccgtttcgatgtgctaacaattctatgctttatgctggccagctgcacttttgcgagttctgcatggccttcttctgccacaagcgcgaactgaccgtgcaccaggaacgtcgcgtctgcaatcgcgtaagtgtatactactggttgtttgtggtgaggcggttatgttgtttgactcacacgtttaccacgacagcacccgcccggtaacgaaatctatcgacatgagaatctgagtgtgttcgaagtggatggtgcaatttccaagatttactgccagaacctctgctatttggccaagtacgtctcatccgttttacctagacgtttcatcgatgtagttgtcgtgctgacatgtctgttgccacagactcttcctggaccacaagaccctgtattacgacgtcgatccgttcctgttctacatcgtatgcgaggtcgattcgcgtggtttccaccccgtggggtatttctccaaggaaaaatactctgagctggggtacaacctggcgtgtatcctcacgttcccgtgccaccagcgcaaaggttacggccacttcatcatccagttctcgtacgagctcagcaagaaggaggagaaggttggctccccggagaagccgctgtccgaccttggactggtcagctatcggagctattggacacgtgaactgctgcgtattttgaaggagtatcccgaaaaggaggtgtctatcatggagctcacccgggtatgtttttttttctcaccgtggatgcatataggaggcgtccaactgatccctgcgttgtacctttcagatgacatccatcaagaacgaagatatcatcgcgacgctgcagcacctcaacatgatcaagtatctaggcgggcagtatgtgtacgtggtgccaaatcaaatagtggacgctcatctgacgaagctgacgaagaagggcccgcaagtcgtcccggagaagttgcactgggcgccgctgcacttggatatcaagcgtgacaagtggtcgctgaaggccatgactgctgacaaggaggactaagtcgaagacggaagcaggaggtactgtaattcatgcaaggcaatgttgttttatgtgtatgtatgcttgtttgtcctactggtctctatccccctatacattcttctaagtcgtgtggttcgctagtcatggagttgttgcattctggcaagccaactggaactcgagcttctgctcttgagtcatctcactctgcgctgactcaagtatgccagacaggccactgctctgcagcgacttggagcactgcaagtggtaccactccatgagcatgaaaccctcgaggtggacgaacatgagcccgagttgccactcacccttggcgatgcgttgcgagcacacttggcaggtggtggtggcgatgggtgccacgcgcgccacggcttgatcgcatcggctccaggagctgctggaccgtggactggtgcctggtggcggtgcgtcgggaagttggtccatgctgatagttaaggtgagaagtacgcaggaggaggcaaatccaaatctacaagaggctggagctcgaccggcggacaggaatccaagatggcaagctagctggtgatttatctttcaaggcggacttgattcatacggtgatgaagtgacgacgacaaggcagaacagcttgagcccttgcagcggtgagcaaattcgccttgtggctacattttcagcgatcctagatggagtcatccccaagggttgtacatttctcaacaagcttaccagtgtgcaactactgatttttttgcttgttcgtgtaactttcttcgtagcatactgacggtgcagtccgccaagagtgcagggtgcgaaatcgagcacgtatttgctgtatcctgttggataacattgcagtttgccatttctgccccacttcactttccatccacgaatgcgcttcatcccaggtagagaaatccacagccgaacgtggacatcgttgaagtgcatggtacagccgaaatcccagctaacgtgtgccacgtacgtagtatatcctattcgatccaggctaccaggtatagaacgcaggttgtacgcctggaaatctttcgccaagcgaccactgtacaaggtatcaggtgaatgaattcccgggtactgtaaccacgatacgttaattcggtttatcttgttctactggtgtgtgtatgtatgtctatctactctttgcatcgttttctctcttgctgcccctctcaacactggggcgactgctattgtgcttgctctacatgtactactggactgcgacggtaactcactcagacggcactcgacatcgatacatcatatacgagttgcgtccggctgggatcacgaggcggccgccttctggcacgcggcctggaactcttccttctgcgccggcgtcatctcgctctgcacggtctggaggacgtccgagaggccgctgccctgcagcgacttggagcactgcaggtggtaccactccatgagcatgaagccctcgacgtggataaacatgagcccgagctgccactcgcccttggcgatgcacttggagcagacctggcacgtggtggtggcgatgggagccacgcgcgccacggcctggtcgcagcggctccaggagctgctggagcgcgggctcgtgcccgggggcggcacctgcgggagctggtccatctgcgtagccatggctagtcggtacttgaagcagctgaagctggaggctgaagttacttgcagtcgagacgagactgcagttggtgcttggttggggacaacgcgtgtcaggtcaggtcaggcagacaaggctcggcttcggtggtcagtggaaccgaaggaggaggaggaacttgcttcaggaggaggaggcgaatccgaaactgcagatggggctggaggacacgctcggcgctcggcactcggcaaaggaggtggagggtggcgttcggagcctgttactgtggcaggcttttcgctgtgatgtcgcgaacgaaactgatcactggcgcgcgcggctgacggacgatcgggcggacgattgacggacggacggagcaacaggcggcggcgggcttcctccggtgcctgtgggtatggcagcgaaatgcgttctggagcggggtcgtgcctgccacctgccggcccggtgcgccagcggagcaccgctctgctctgctctgcagtgacagcggctcggcagccgatttttcgacgccgttaaaagacggggacttgtcgtcgcgtcgccacgagctccgccacgaccgcacgactatcgccgacttagccaaatcgcagggatgccggcgtttggcgctctattgagcgctgctgcactgtgggtgagtgttaggtgggggtggaaggccatcggatcggagaccgagagcaatcctgcagccaagtaaagatactggagaacccctcacgggcggcggcgcagcaagcaagcgcgcgagcgagcgagagcgtatcgcagcgacaccacgctgattcggcgtcgcgccctgctgctggcggcgccatgcgaaggcgctttcgtggctcgcgccagcaaattctgccgagccgatcggggcggccagctggcgcggggccgtccagctttgcgccgctccggggcccggccccgcccgctctgcgctctgggttgggcctcttggtccgatgtgctggcgcgtgcgggcggcactttctcctcggaaatattcgcgcgctgccagcgccggagccggtcgatcccggaccggatcaccacttttttcagaggtctccgtctcgtggcgccggcgcccgctccctggagacagagctgtctgtcatgctctcgcgaagcgaggttggcttcgtcagttgtcttgccgcgccgtcctgctggagggtggcaatgcaatgcattgggttgtatgtactgattgctgccgggtgcgacacgaggcacgagcgccaaacaaaggacgctcgccgtttggccattctttcgagtccgcccagggcggagctggagctggtgctccctatatcatgtcggtgctcggttcttgttcaagtcgatggtgtttcgggcttgtctgctgcgttaactgtcacggggacgagcagagacacggcaatggagacgaagctcgtcgccacattgcaccggcggaccaggccgtcgtaacgcggtgattgccgagtgaactttctccacggcaccaaacctcgggggcttcctcctgcgtagggtaaaagtcaaaaggttcactcagcccagccctcatgcgtgtcaaaatttgcccgtgatctgttctgggcggcgcgacgactgcgcgaagcttcgcactcgcgtaatttaaacgagcaattaagctattcaagtagattacccttgatttgttgcaacgtaaataggtttgtgtcactactaataagtaggtaaggaccaaacctttagaaaacggataagtaggtttggccctaacctacttataagtagtaacacaaacctacttatgttgcaacaaatcaagggtaatctacttaaatagcttagtttctcaaatttacacttggacgtccctctgttcgtcaagtcccgcttaggcgagatccgcacggcgtccaggtggtggtgagtctttcgtcagtcattccatgagcgaagctcagcggcaggccgagaagcatggagtgacgatactgacacgcgcggtcgactaagctaagtggctacagtctcacttgccgatccttggaaccagttggctcgggtacatgtagaggaaggttgaagcacaaaacctttcagcgccatgacatggctccaaggagctccatcgtaggcccgctcgccctgcgcggaggatttgtcgagcgcatggccatgaagaggagccacggcacggcaagcacgaggctggtctcatagagtaggatagagtttgcttcaactgctgagctacgtggcttcagtcgcagctcatcttgagcctcatctcgagttatttcgttcgtccatcgaaaagggtagaaagggaggaagagatgcaagttgcagcgcgagactctcgacgctcgtcatggagccccgtgtcgtcatcagcatcgcacagcttcaacgtaaaataaatggcagcaatttcttttttctttatcaattcacctcacaaaggcacccgatcctccacgctctgccggccggaaaccccctgtggcttggcccgcgagcagtgggtccgtgcagctcgctacataatgttaactccctcccctcgcccctcgagctcgctcgcttgcttgcttgctttacatgaaatcgtccgtgccgctgccgtccccctgcgtgtccagatgcaccgcccggaagcgctcgttgctgtcgcggatctcgtcctcgctgtcgtcatactccaccgtctccgcgtccgcatccacgtccaccgtctctactaccatgtcggaggaaggcgcggtcggaacgctcgagccctccccatggtcagcgaacccgcctcctgtcatggtcatgtacccatcgacggagtcggcggcatccgcagcgtccccttcaccgtctagtgccgccaccgtcgagctgtggagacgcacggtcggcacgggcggcttcgccttctcgttcttgacccacaccttccagccatccacgggcggagactcgtcatcaatgtgcgactgtacaaagtaaaagtcctcgtccgacattgtccccagcagactcttgttcggcgagtaggaaatgtaccagcgacgcgccttgctaggcatgcagcagcggaacagcgtgtactcgatgtcgctcttcacgcaagcgtaggtcaagcaattgtcgtggatgtgagacgtgctgacgtacactccgttaaccgaagcatagcccgccccttccaccacgtatcgccgctgctcctcctggtaggggataccaagcgcctcgcccaggcgccataacatctccagctttgctggttcccgtttgagcagcgcaagacgcccgcccaagctaggctggagcgactcgaggcgcagccactcgtagagccactcccattcgctgcggtgctctgctaaccacgtgctcactgcaggcacgcgcgcacgcagctccagcactaggatcagctgacggtacacgaaaagcgggacgtgtgtggtgctcgcgtagcgtgaccgcagactctcgcggcttctagctgaactgagcagcccgtaatcgctgtgaaccaacgccaactctaccagttccttttggtagtcgcactcgtagcccagtacgcgctgcaccgccacggtacaagcgtccacaacaggttgtcccttccatcccgtttcagtgctctgcaagcagtgcagaagagcacgcaagaggcgcgtcgacgtctcatggtctcccaaactcaagcgtagcaggagatcacacgtggtttctgcttcctcctcgagagccgagtcgaagaacacgtcgttaagcagcgcaccacggcttaacgggctaagcccttctagaacttgtgctccagtagggacgtctccgttcgtcatggagtgtctctggaggtcctcgctgaagccgaatgcgcgtagatcctgaagcacagacttggtagatgaagctgccatgtccgtgtaatacagcataaacccatcaagctccacacgtgcagcttctgtagccgagtcatccttcaccgagtcaacgctaggtgtcccatacttggcaagcatacttcgagcctgctgctcaacagcgggactggtcgttgcactgctaagtgacacagaaaagaatttcttgagctcctcgagactcagaccagggttgccatcaggacctccctgcgtctgatggtcttcaaagatctcagccagcgcatgctcagccttgtccgacaaaaccgtgcggtgcggatactgcgtgctgccctccgtcagcaatggttccgttgtgcgcctaggcagccccaagattgcaatgacagcttccagtagatactggtaatccggcgaggcgtaccgcgaagcagtaggctgcaatgtcgaggacgggaaagcatccttcaatgcgctcgggccgcgttcgcacaggaaaaagttaaccaaccgcgcaatcatctccagttgttgcagttgagagcgagccgtggcactgatttcagcacagttgcgcaagagcatgaagcactcctccaagtgtgactgttgcatgatggatgtttgatccaggaaagaagcgatagcctccaaaaacgatcggattactgccgtgtcagctgccgcagctgcttcagcgctcgcttcatccagcgccgcttgctcttccttccggtgagcttcgtacgctgtgagtgcacgcgaaaccaagtgcacgaaggactggcgagcaatcgagtcggggcattcgaaaagcagtccgcgcaaccaaacaattcgcttcgatgtcgatagtgccgaaaagaagcgcgcgcagatagccttggatcgggtgaacttggatgccagcacagtgatccaccgtgcaattccgtgcttctcgcgcgagtgcaacagcacactcagcacaaactcgacgccgatctctgtcaatgtcatctggatttcttcatcggcacggaccgctggtactgctatcgccactggcgcggctggtggagttgccgggtctgtcgactccggtggcggcgatagagccatgggcacagcctcatccgaagatttggcaggggtatctttgatgtactgggactgcaccatctcacgaaggaactcgtggaattccacatcgaacaggtacgagttttgcaggaacgcctcattggatttccacacttcagcttcatactcgcaacgatcttcatcgggtgcagcaacaaccacatcggttgatgtttcagacccagcatcagccttttcagctggcgtagcctcaggctcgttggggataaccttctcataaaagagcatgagggcgttgctgaagacttccatctccatagagttgttggaaccgtgccacgaccgccgctgcactcccccaaaacactcagcctcgatgttagccgggtcaaatggtgtcacatcttcatcatcatacttgaaccacttctcagacacgtgatcgtaaatgaaggaatagtagtgaccaccttgagcaacaccagagtgcaccagaataccctttaggcggtactcgtaattagggtccgattgggccgagctcttctcatcactttcgcctgtcacgcttcgcggcgaagctgcaagcttgatgctcgacctaggggacactgaagacgaagaagttcggatcgccggcgtatctctattcacatcagccataaactcgtcggagtcgctcgagtcatcagaagccatatcttcgtcagcagacgtatcttcgcgctcttgttgcgaagttgaacgagcctcttgctcttcgatgcccgccttcgtgtatggtttcatgctcagacgcatcgggaacgaacagcggttgttcaacttaacggtctcgaatgtcgtgtagtcaaggtcgaaccgttttaggtgaagaatcaacaggttcggtagcgacccgaagcacgtgcgccgtaccgcagcctttttggtagcacaattctcgcactcgaccttgttatcaccatccatcagctcgccttcaacaaaagccgatagagactcctcaatgctctccttgccacggatctgcaactctaggcggataaaaggctcttcacgctcgtagcggtgtccgcagtccttcggaagcttctgcgagatgagtttcccaccgagtacgtcttgaagacacctcgttccctgaggggttgttttcaaaccagtctccaggcggtccaacagtttgtcgcaaaactcggtggcatcattctgctggtacaccgaaaactccaagttcaggcatgtgcacgagtcaacgaatgccttcgggttgaagtaacgcatttcgctgtcgcgcagatagcagaatgttcgctgaagttggcgaagaacttccagtgtcgcgtcaatgcccgtcaactctggctgcaggatgacataacggccattttcatttcccggtcgcccttctgcaagcacaaagctcgcctcgccaccattgtcgtatttcattgtatgctggcccgtcaggtcgtcgtatccgacaacattggcttcgtaaactcgaccccccaggcactccaacgccacacgacagccaaccaagcgctctggaaacttttcggcctcagcttttgtaggctctcgaggggtcggacgcggtgctaccttggcacctagcaacccttggcgcagcgtcgggtgcatgaacaactgctgcaagaaggagttcatgtagcacgagcagccttggttcttgagaccgacatgttcgccgttgccacgtgtttcaatgttgttttcttgaccccacttaaaccgcaacgcgtcgcttcgggtaaacaacctggtcaagcgaccctgcaagtcgtgcaaaatactggagtcatacgaaatcgcactcgctagcaacttgaacgctggccggcgagtctccaacgacacacaaagcggacagcggtgtcggtcttcagaaggtaaagtgaacaaacagtcctcatacacaacatctacaatgtcgcgagcgattccagctcgcacatcagcatgcaccactagaacttcacgcaaaaactccaaaaacccgataagcacctcgcctgaccgctcgttgcaagctaggaacttgctcgaaaagccgcgacgcagctttgacacaacagcctgagccaacttttggcaatatgaagatgtcttgccgccctcgagacgcgccaacgagcaaagcatacgtgtgtactggtcacacggggcggctacgttctcgatgcgatcaatggactggacgcactcctcgaacactacttcggcagctgcatcagacgccttgcagacagattccaacgacgatagccattggtcgcgcacttgctccgactcgaacttcatgaaaatgctgacaatgatagcccgtggctccagcgccttaatatacttggccgccgcatcatgtgcaattgatacaattgactcgacggtcttcacagcatcgatcaaaatccggtacgctgttttcttcgcaggtgttttctcttcaacacgggtatactcggataccacaagctcagcgatcttaagaaccagctggtcataacggctttgctccacaataattttggcccttggggcgtcggcgccctcacctcctgcgtgatctgcagtcagggaatcatctccagaaaccaccgtggccggtacctccccattagcagtagctgagtacaatccattctcgtggcccgagtcgaaaaggcaaaacttcaggattcgaagcgccactgcagcaccctcattgaaggagctttcgtggaagttcgcgctaataaaatacgatagtacttcgtgaaacccacctccagatatgaagcgctggagatacgtctgcgcaaacgggattttggcgacgtctgaagggagaagcagcgcatccataatctgtagtgtgtaaatagcctggtgagaggagattcctttcaccaaagatgaccaatccggcttagttccaccattagcaggctcatccgatggggaattcatagccacatctccgtcgcttgtctcagaagcaccgatacttgaaacgcggttcaaaagctcctcgctagtagggatctgcttcaaaaaggcccacagcaactcgtgaacagaatgaccctccacgatatctagcactcggaaaagaatcccgaagtatgaggcatcgcgagcaataactaagccagggtggtgctgggatgagagggaagaaggcgaggtaggtgattccttgcccgccgaggtcatcacttggtcttggtccatcaagttggagctagaacgttgaacaactgagttgaacatcagaacgcgcagttcgctggactccgttatctgcaagtctgcgagtgtcttctgatctccagtaattgccgaacctgaagaaagaattttcgtctgctgcatcggatgacccaccaacttttcgatttgcttgcggaaaagccacagagtctggtttgaatacgctgatgcctgcatggttcgaaccgcattatcttgactcgagtttgctgtcgctgatgcgccagctgccccactcgcattggatgacgggatccgctgggcaataactttaatcgtaaagtacgcaccgcggccgctcaagccatgtgggacgaagttttgcttcttgcgagcactggaaaccagccccgtcagcaaacttgagcactgctggactaacttcagcgagtctggcgagctgtcctccactgtagacaactgcttaaatacacgcgccaagaaatctttgatgccagcgtctgattcgctttcacctgcgcgggtaagctcgtcggacgatcgttcataaacgcgaagcaactcgcgcgtagccatttcagcaacttcaagtggggcttcgaatgcgatacgccacaaagcatccatgccgagcaggttgagtgtgtttgtttccccggattcttcagtgcgttgcatcagtttctgctgtgcattaagccccacgaagtatgcattaaagcacttgtaccccatacagccaagggtccggaagtcggtttgcttgcacaacagctcgttgaaaacgtagaagcacacatccaaattgaaggccgagccgattgatcccccaacagtactcaggctaggtgctgctccaccttgctggtggttacgcatactggtctggttgaaaaaaatcaagcagaactcgcgttcagcaggtgacgacgaaaggacttgccagagacgctcaatctgcgggatcgacagctccaacttcggagacttgacgtggacgtagtggatcaactctaaacgatggccgatggctgtgcgatagctcggcgattgtttgtccgtgctccgagccacaaaggttgcaagctcgtcaaacagcagactcactaaaccatgctctgaattgagcgactcaacaacgagcgcctgatccatacgatacgagtcgatcagaaactttagtagctccaaagacttggacgctgttgaatccttgcttgttagctccgccgacgtaacggatgaagtgcttataaccgagctggtgcttccgggtgccggcggaacggttgaagaggacggagatgcaacagaatcgggggccgagcttgatagcaagcaagatttcttaattccgtcaatgcattcgttcaagaacgccttccgtaacggctcgccgtactcgctccgtagtccttcttggaaaaagtcacgcaggcttctacttagcctgatgtttgcaatactgcaatgcatttgaatggaccaaagcagctgcaagatcgctgtcgtgacgttcacgttgcgctccattaagaaactcggtgagttggttgctaaccgctgcaaaaacgaaatcaactccgggaaaggctcgttcttctccaagtttctcaacaacgacgcgtgaatactttccaccagatgcaacagtagttcgttcgacaaaaatggcaccgtcgtgatcagcaggttgtgaatctcatgaaccagcgtctggtctttctggatacaggactgccaaattacgtcaatagcgtgggcatccagcttgttggattccgctaaaaacttcaccagcaacgcgcttcgcgacacaatctcgcgatgaattctgtcgccaaaaatctcctccagaatctttttctccaccacccacgcactaagtatgtaatccagtcgtgtccgatcctcttcgccgttatcttgaacgctttccgcaattagttcaggagcaggggcttctcctttgcctgtggggatccagttgtgggtcgggggcaggtactcctcgtactgtgattggtgctggtagtaatcaatatcttggtccgacccaggctgcatcttgtcagcttccgagataaaccaccactttaatccacttttcatggtgcaacagaagagcgtaaacatttgacctgtttcgtgctgtcggaaaacgtaagttgccgaagtggagttggccttcaaggtgtacacaccattgacgccagcagtaccggcgtttcggacaaagtatcgaggcgggaacgcacgcgacgcgcgagcacagttgacgatctggttgatttgctccagtccaaacagtcgcagaggcaacgaggtcgattccacgtacctctccgtaatatcaagccaaagcgggtttatggcctcggatgagacaatcccggcgtctaccagcctccgaatgatagcgatcacggcgcctacagagtcactcgactccctcttcagcactgagtccgagatctttgtgaagtacgtcatgatcagcaccgagatcttagtgcagatgttttctgggacggatgttcggaactccagcagcgcctgcagcaagatgcggatgtcctcgctgtccatcgtggtctccagctcgtccccctccttgtggttctgcatgagcagctccaacgtgctcaacagcagatggaaccccttcaactcgcagaacgcctcgatacactgcgcgcgcacttccggggaccccggcaccttgttccagtagctgccgatcatggccgacgtgcggaggtccttgtagaacgtcttctttttgctgaagatcaaggtcagcacgggcagcgcctggaagtacttgcccgccttgagctgcgcgatcaccagcggcaccgccagcgacagacactgcgtcacacacgacttttcaaaagatccgatcttgctggcactggcagcagcaaaacaaacagagaaagacaatgttagagagatccgcgtcaaaagcacaagtgacatgggcttgttgcacgcactgctggtccagcatgatgctgatgatcttgaagaaggcgtcgtccaggaaggcctggctctcgggccggtcgacgtgctggtaggcggcattgagcaccttgacggcgttctgccagcccacggtggacttgaggcgcaggtcctcctgcaccacgtggaagagctcgaggtcctcgtcctccatgtcgccctgcatcaagtgcgtgctctcctggctcttcttgcggcgcttctggccgtccttgtcctgggcgggggcgcgctccatggaccggccgtgcagcttcttgtcgcctttgcccgcgctgctgctgctcgtcgaggggctgctggggctcggtagcgcgggtatcgtgcaggcggtcgcggagctgcgtgccacaggctccgagctgccgccgccgctgctgctgctgctactactggtactgctgctgctgctattactgctgctgcttaagttgccgcagccgccgcttgagttgctgcaggccttcgacttggagctgctgcagatccgcttcctcttgcgctgccgccgctggccgtcgtcgcctgccgtccttcctctcgggggtgggtggactggctggctgagtggctggctggctggctggctgagtgtgtgtgtgtagcctcccgcttgccctgctgcctctggacggtcgcgctgctgctgctgccgggggcggacgctgctggtggcttcgacactcgcgaggcttttggctttcttttgggttttctcccccgagcgagcagcggcgctaagtgcggatcgggcattaggttcgctgtggtgggttgaaatctgatttttcgcgaaagcgaaaattcatgtttggaagagcaaattgctgcggcggacactacagtatagtatgaacaactgagacgtctttgttggccgctctcgtgctggagactctgcttaacctggcgcaggctttccgtgggctgaactagtgatcctcgaccaaacccagtggtcgcagcattggccagcataacgaatcgcgcgactaccgcaattctactaacagcaggtgccagtggcagttcgtccagcgtggccgcagtttaccacaactacaggaagcgctcactgatagcgccaacctgaactcattgcgtggacgacggacttgtacgggtgctgagggtggcgatggcaaagcccatcgtatcgatgacgcgtgggagtctgagtctgacgaagaggaagttctgaagcgcccgcgcgaggaaggcacgactatgccgacgcgctcgagcgcgtcgtggcgtcagcccatacggagaagaagagcgtggcgaatgcgcctcgaagcggcttggtgaagtgcaccaacgccgcggtgctgatgcagctagcgggattggtgtcggtggtccccgttgcagcggcgtcgacacggcacgtccaagccgtggcgccagaggctctgcgcgtgcgagtgctgcgtcagttgcgccaggccgttcaggagacggatcctgcggctgacgaggttgataccagctcggccgacgccgtggaggcgccagcaccggacgcgagttgccccgacagcgtcatggcgcaggtgaagggcatcatgacccgattgacagaaatcggcggctacgacgtggagcacccggacgcgctgacccaagccaagctgcgcaaggagtatcgagcgctcgagcagcagctggacgcgtgcctttcgtcggaagactacgcccacgagctgaagcgcgaggagctggcctgggaggagaagaacgcggccgccaacgagcaggctctccgggatgtgcgtcggtgcttgccagtgctggttcggtccacgtccgaggccgtgctcaagtccaccaagtcgccgacgggcaggccgctgcctccggccatggcccgccgcttcaagcgcacgacggtgctggggctgctgcgagctagccccgccagtactgcgcagatgcaccccagcgccatcgtgcacctcaactacatcggcctcaacctgacggagcgcagagcactccacgcgcacctgcgccagacagcgcagctttgggaggcgagtccacgaaatgcactgacccagcagaagatcgactggtacagcggtctcgtgtacgagttgaagcgagctatcaccagctacgacaagcacatggagcggaacggcgtgccgggcagtcagacgggcaccggagacctctacgaggaagaccttggatggcctgaaggagaggtgtacgcggatgcagttagcgctgtgaagtgcggattacccgtcgacgagaccgcgctccacgctagcacctagtaggtagagtatgaagcagaatcatattttgaagcaaacgtcgattacatgcagcattgggcaataaacaataccaagactttgatatcaattcggtttacgttggttgctgtactcgtgcactgtcgagagttggaactagtggtgctcagttgaatttcggctcgtataagtcgcgttcatccatcttcgtcttgatagaagagaggaattcgactcgagcaagggtttcgagaaagctacgacagcagttggtatagcaaggatacaaaggtacacaaggctgtgagataggaagtctactgactctaaaactggtcagctcccacgatgcgatagttctcgggatcgcttggcatatctgccgcccacacaatgaggtcacgatggcgctatcagtgagcgcttcctgtagttgcggtaaaatgttggacgatatgcttcatgtctgcaagagattgttgcttgtcactctctccactctccctctcagctccatcgccggcgtcctccgtctgcacgtgaacggctcaactgctcttctcgtcttctccatgctcagtcccttctgtctccccttcagatccatcattatcctcctccgtctcgactccagctgcacttgagtcttcgctctcgacttcgctcttcgctccggtctcctcctcttcaggcgtcgccacgccgctgatcctcctcaggctccgggagacgcggtcgatctccacccccagtcgctcccactggcgcttgagctcgtccatcgattgcgcgttggtcttcggcggcagaatgaagaatgacgccagacgtcgagcaacttcaactttcccctttcaactgcgatttttcgccctaacgcaaatatccgcctatctcgtgatattccttccccacttcaccttacgccatggatcgccttgaagtgcgcgcgctgctgggcgcttccactgcgacggagcgcgccgcggcgccgcccgtggtgcgcggcatctgcgtggacgacgcgctggacgaggaggcgttcctcaaggcgctggaggaggcgctgcagcagcacgcggcggcgctgcagcggcagttcctggagctgagcgcggcgcaggtggaccgcctggccttccgcctgcacgacgcgctggtgcccaagcgcgacgccgacacgcgcgtggtgcaggcgtggaccatccagccgcagctgcagctcaaggtcaaggccagcgcgcacatccaggtgctcaagctctcgacgatcctgcgcgaggtgcagcggctgcggctgcaccagtcgcaggccgcagagaccgtctccgactcggagccgagccagctgcccattgaggtggagatcttcccgtcgctgcgggtcatcgaggccctcaacacggaggtcaggagtctgcgcaacgtgcacttcttcgcgggccagctacgggagctgcacatcgagcacacgcaggtgccgacgctgaggcagctgctggcgcccgacgagatccagcagaagccctggaagaagctgaccaagctgcagatgaactgctgcgtgctcgaggaggtggacgagtcggtgaacctgctgcgagcggtgcggacgctggacttgggctggaaccaggtcgaaaagttcggtacgagcatgacgacgcggtcgctggaggtgctgaacctgtgccacaaccagctgaaggaggtgccgcccatccagtccctgcgcgcgttgagagagctggatctcgcggtgaaccgcatcacgtcgttgaaggggctggagaagctcaccgcgcttgagcggctggatgtttcgcacaacttgatcgacgacattacggaggtggagctgcttatgaggctaccgaaacttacgtacgtgaagatggagtttaatccgatcgctcggcggccggactaccgccgagaagtgctcttctacttgggcgagccgatcgagctggacggccagcgttggagcgatgccgaggtcagcagcatgaagaagaggcgcatgctgcttatgctggacggagagaaagagcgcagtgttgtcgacagcggcatctgggggcaatatgcagagaccccgacgtaccctaaggtgcgagtgcaaagtggcatcgttgtcaagaacccgaagcttgtcctcggatacccatcgttacctcgatctcagaatgtccccgcacactacgtggaaatacagaacccgccatcgacgttgcctacaagaaaccagtacttgatgaagaccacagagactggagagaaatccgtcggaaacggccaaggttctcaaaccagtcggccgccagttcgatctgtgggcgagtacttcagaactcagtgcgatgtcatcgtatccaaggagaagaaggagagaaaggagagcgaagatcaggtcataacggatggtacgttgcgtgtatcacttctccaaacatgtataaaattgcctcaagactaacgatacccaccgatgtgcagaggaggatgacagcgatgactccacaacaggcaaacgccgaactcgcagtcgcaaatatacggcaagtgacttcatgcgcgactttgaggaggaggaactgctcattagagaaggcaacgatactgacactgtggacgtcctcgttgcccggcccacttcgcagagccagctgtcgtcgcctcaggtacagtacttgtcgaagattgtttctgtgttgaatcatggttgacaaggaactgatatacatgcttgtactcatgtcatagaaacctggtcgaagcatcagcgtccgagtactccttagtgcaaaagaagcggctgagcttgatctgcactttggtattgatggtgttccagcaaacgtagaaatcaaggtaggcgatatgttatctgatgttcacttctgcagcgctaacactttattcgttacagcctcgcgaattaattgagagattcactgtcagcgacggtaaggaaccgatagccatcacgcggtggctcccagatgtcgtcgctgttggcacatcaattcattcaagccgagctaagatcattacgatgaagctgcgaccacgtgtgtcatcaagtgtggctgacgctgcgtatcaatttgacgtcatcgcgtcgatggagacgctgctttcagccctcgtggcccgcctgtaccagcagaacaagggccgagtcgtaatctgcaactgtgccaattgtggagctctctcgctgctcacacccaagtaccccgagcgagcagaggcagatgaagtgttgatggtatactcgtgcttgctgtgctcgagctgcaacgtgagagaagcttcgtttaaaaagctggtggcgatctgtgctaacgagggaattactatcccgagtagtattccactggctccaccgccgtgggagacaattaccgagggcttttatatcgaggaacccgcagccacggacacatcttctggttctgctatgcacgaatgcagaatgatttccaacaacggcattcgcgaagtcgcggctccatcctttgagcaaacgggtgacaatcacgaagttcacagcgatgagtggaacgatgccattgtgcacgccatgacgacgacaatgcggtgaagttttctaaggttggttaatgttttgtgaatgtgattccatcgcttgttaagcgcaacaacgtctactctagtttatctaagtttgtcgagctcttgtcttggtgacgtgaaaacggcgcaaatagtaaaagcaacagcgattcagtgacgagcagcaccacaccgtcgaagatgaacttaggagcgaagatggcccacaccatcaggtgtcttcgctggagcgcgacaaacagcgttgacaccaacgcattgagagagaaataggccgagaacgcaagggccaatctctcttggcccaatcggcattgctgtctgctcaaggccagccagggtagcgccagcactgccagcgcgaagcaaccgaacgtgttcaaccccagtagggctcctgcggcgtagaagttgaagacgtcgaaacccacgaaccctgcggcattttgcaagctcgtgaaggtgtttgcatggcccgtggtgaagaacgcttggtacgaacacgaagcccaaagcagtatccaaggtgtgatgctcccagatactgctacagcaccagatcggcggcaagtgacgataaacgcaaagcttagacactgcgtcaccagacaaagcaccgacaacggtgacgtgggtccaagcaccagcataaacgctggaacgagttgccacgttaagatgaggtggtcgtttgccagttgcaatggttctccaccggaggctttccgtctctgctgccgtaatgcgcgcacgaggaggtaaactagacttcccaagaagctcaaataaacgaagcggggaagccacagtcgccagaaagtcacctcgattggtgaagctgcccagaagatagcgcacacgcagcagcttacaaccgacgacgccagcatgaacgttcccgtcaatgacagcggacgtccagtgaattgagcagccttcaaggaagacccaacagcaagtagggctgttgcagcgagtggggcaaacgttgaccctagtgtcgtggacgccttgatgatgttgggtggttcgatggcgctgcttacccgcgtggcgcaaaggaacatcagtgcagcaaccgtagcggaagctctgttgacgctcgtacattgcgcgcaaccaagcaggaagaacccgatggtggctgatagaaattgcataacattgccttcagccacgatgtagctattggacagcagcgccagcgcatgaagtacgacgaccaccgtgacaaccacccccaccgcagatatggaaggtagccatgttctgataccgctccaagggcctccagtagttagtataacagtagatttgcgtggaaccgacaccagcaaagtcaactgagccaaaccactgcacgaagctaccaccaacgctcgtgacaacggggcagccggaagcaagggcaagttgatacttgcaggacagacgaagaacaggccgcccacaatagcgacagcacccagatatctccatgactcactcactgggcttccacttgcagattttctaacgcccacgataaaggaccacgtaagcagcgccattccccagcccatactgcacaaatcgaactgcgtccagatagaacgacccagtgacaaggtttcgcgcagataattctgctgctgttttgccaggtcttcatgaaggcgcagtagcaacggaatgtctgctttcgaatacgttgagcttgattcgcttccgtacactccctccaattgcttctcaacattcttgatgccgacgaatagcttctccagatgatcatacgctcgctccggcagcttggattccgatgaatatcgaaagaggtagcgtcgcacctgatccaggttcagccgcaatgcgcgattcagcgactgaaaggcggtcaccgctttattttcctcacctccaactgatgtctgctttgtagttgctggtggtacaaagaacaatgacggaatcacgctgccaaggttgccaaacgggataggcaagccactcagcagtgctagtgtcggaacaagatcaacttgcggtacctcgcgcgagctgtcgagtattctctccgcatacttttgcagctcgtcatccgtcccgcctcccgtagcgacaagtgatgccttgctgtacaggaacaacgcagctcccgtctcttcgtcactggcacctccgtggttcccatcagccgacatgccgtggtctcccagcacagccagaagcacgtcttccccgcccggcatctccttgagctcctgcagcaactttgttagtaccccgttcatctcatccagtttctcagccatgaagacggagctagggccatgggtatgtccgacatggtccactcctaagaagtgcgcgatcaacaagtcccagtcaggcttgtgcagttccggaaacaagtgcgctgtgaccccccgatccaccgagtgcaggtccttgacattgaacgagtcaaaggcgaacttcctcgtgaactcccgagcatacagcgcgtcccacgtgtcgtcccccatgaacacgactccgcgctgttgcgcgcgcagctggcgcagcaaattgtcctcgacaatctggctgctggtcgccatgttgtccttgatgtccaagaacgtcgggagcgagccggtcgtcagtcccttgagcctttgcatggtcatcgtgggcgggtccgccacgaacttgagcagtagcgcgtgctccggctcggtagccagggtatcattgagaaccggcagtcggtcgctgtagaacgccgaccgttgcgagctcgaccgggcagccgcgaagtcgaaccggagcgcgtcaatcaccacgaacacgacgcgccggaagcgtcgaggcatccagcagccttcagttgcagcgtcgtcggagcctcctgcgtcttcatggccgccacggaggtgcgaggggctggagctggcttcggacggagacgcgtggcagctgctgaggtccgacacttcgaagcgcgtcaggaagaagcccgtggtgaacaaatacagcgccgcagcgtgcagcgccagcagcgccgcgagcacgcgatgccccatggcgacgcggatccgataatgagcgagtcgacttttcgtccaatcgtaactgcgctgacgtacattaacacttcagggcctgtgcaatgctggacacgcacggatcagagcaccacaaccacaaccacgagaggctcaaggacttcaaggcaaaagatatgaatatatgcaatcatgtagctcagcggactagacctcgcgttgtttaggcgtctgcccacccttcggcgttgtgcagccgcacgtcggcgtccatgttgggcgagttctggatggcgtacagcagcttggtgcgcagcacctccttgctcgtgtaggctgggagccgcagcgcgaagaaacacgtttgcgcgtggggcagatacaggtccggctggcctgtggcgcccgggtcgtgcgcggcctgcagcttgaagttcatggggaagtccttggcgctgttgggcatgcggctgcgcgcccacacgaagcgcaggaaggacgtcctctcctcgcttgtcatctcgcgcagcacctcccagaagtgctgcacgtgcggcatcgcctcgtcggccccctcgctgtactccgtgcactggcgcagcaggtccacgtccacctcgcgacgtccacagatcagcacctcgagttcgcgcggagtgaacaacggcgccagctccatcggaagcacagacgctaatccatccttgagcgcggcgagctgctggctgctctccgtaaggcgcgtcttctccacgagctgcacgtacagctcacggtttgctagagtcaccgccatcttctcaccctgcggcaccaacggaacctcaacgccatcgctcagcgtcgtcgacagggtcaagtagcccagcacctcttcggcttcttcagccgccgactccgtctcggtgctgagttccccaacgcggttgagattgttagcagccgcaacatcaacgctctcgaggtgtgcccggctgacttcaaggcctgctaggggccgccacacgagcgcagggagatccagtcccatctgcagtccatgacgcactgctgtgccaattagcttgcctaggaagcgatgcaggtccaaggccatggggccgttcgctagcaaagccgtgccgcatgacgggttcagcaagaacttgtcctggttgctaccagtgccactgcggcggttcgggcacgggatcaacagaggcaacaagccttgctcgccctttgccagttccacgttgtccatctgaagttcgtcgacaatctgctcaaagaccgcgcgatacggtccaccgtagtcgttgacaccttcgccaaggaacttgaccttgaaagcacggcgttggcctccgtggccctttccgcagtaggcacggcggaagaagctgtcgctccacgcacgcatttctcggtatagttggccgaacactgaacggcgcagacgatcacccggttgcgacagcaaactcagctttgacgcttgcgcttgaatgcggttgatgcggataacgcggatctcgcgtgggtcttcgtactcatcggatggcagcggcgtgcttgtcgtcgtagcacgcagcacgtcgtcccaaaaagcacgtttcgtactcgtgaacactaaccgtcgcagggaacgcagcttcaaactcatcgacaaaaactcgctcgagcgcctggtagaagcattgctgtttccactactgctcgaaacttcgatcggctgggcgctgcttccatcgtcaggctggatagcaataatcggaagcacccgcaggatcttgctgttcaacacccgtagcaccgctgtgcgcgcccgcaactcagcacccgtgatgttctttaaggctggagacgtgaaatagtcttccacgactagcgaacgagtacgtgatcgcccagatcccgaacatgcgtagctatcgacctcctcgggggtaaccgcatcggtgatgctgaggttcgttacgtccagtccgattgctgcgcaataggcgtttaggcgctcaaccaattgcatgtccgatgtcgtcgtatgcgcccgcgtggccagttcaacaaaagcgtcgaagtcagtcctcgcccgttcctccagtgttgaacgaggcttaaacggaccgtgttcgggtgcgctctcgtagtccgacacatccatagcgctgttctcaatcaaagtcatatccttaccgccccggcgaattaaaagaagctccggcagttcacttggagaccaataccacgcccatgcacgtccttcatctgcaccctcgtttccttgggtctctgtgcgataccacaggaacccgcggtacacaccgagaatgacagcttcctcaggctggttcaactcttgtccatactttgagcaaatacggacacggtctcccgccaagaagggggcacctagaccagcagcgttgctgacgcggatgcacgcagcaggggaagtgtcaaagtccacagaaatcccacgtggacgtgcatggcatcgctgccaatgattatcactccagcgcttccattccgaccaactctcgcgtagcagagtctctggtagttttaccctggagtcaatagttgcaggagatgccatatcctctggcgatgaaggtccgctagctgatgacccggtcgtagccgacacctttccctgttgaattgacacgtaccatgaatgcaatgccttgctcacatccacagcgtccgataggatctggcgcggcggcactccgggcattgacacccacttctgattaagcgtgacacgatcgccacccttgcgcatgccgatgcatgggtacaatgtccgcgaattgcgctctcccttcatgttctcgaacgcaacacccaagtcggacacgatgtgctcgccaaatttgatgccatccatgaaaaatgataacttgccctgctccatgtcgagtcgaaccccaatggtatcactcgcgttaaagtgatcgccgtagatgcgttctgtactgttgtgatacgtagcacggaagttcacgaagccccatccgtgccacctattcaggcggctcgacaacgcggcttgagaaccgggcgggcctgccttttcgcacactccaataaacacgctgccaaattcagcttgctctacgtggacctcccagtagtgcacacccgtggtaaatcccaccgtgcctaacgcaaggttccgggactcgccgctgtgacacgtcaccgatagaccgtccgacgagatgcccagcgttgaaaagtggttgtagtggtccattgtgaacaagtacttcgttgacacttgtaattcgccacgaatttccacgagctctccatccttgacgccagcgtgcgtatactctccacgaagcgtatcaaccattgatccgtcagtggtggttgtcccaggggagtcgagagacttgagtggttgcagcatatacttggtgccaggctgccacttttccgtgccaaagcgaagcatccagcccatgtcggggttgccgcgagttaactgcaattcttgaacgcaaagagatccgtcaggatatctcataccaacaacgcgaacagcagcaccatagtcaggccactccatcaggccagccaccttcgtagcaccaggttcgactgccgtcatgttttcttcgtcaacgaaaaggtacaatagtacaccaaggtgcagctcggacccaaatgaaccttcatcctcttgcttcgccttcggagtagggtgctggtgcgtgatgttaccttcttcgtccacttcaacatgaattaggtcgaagttgccgtcagcaccccagcggtatgtgtaaagtgagtcgtttggccagcggacagacatgccttcaccatccacgccactccacggcgagacgccttcaacaacacccacgctgccttccccgccatcttggtcacgccacttccagttaggtccgcgaataaccttgcacccaaccttcagctctggctggctggattcctcttgcttttgacgaagtctaaattgcgttagagtgccactccagagctgtgtgtgagaatcagcaagcactccgacgtcgttaccgtgtttccagcctctcggctcctctcccatgatgccgcgcttagcggcctccaatacgtcgatttcatgcgtattcagcatagacgtatcgaagacggggtcttcctccggcaaacggaactcaaaagtggcatcagttttctcctggagcaactcgggcatcggcaatttcgttcttcggcctggcccattgatggttagccgatcacctgagcctacaacagcagcagcggctgccacgacgtcggtatcctcagttaccatgttggcaatcgctgacagcgtgatatcaggggcttcttccgagtcactgttatcaacctccatgttggtgaccccactacttcgtgctgcactgttgtcttcttcaatactttgagcagcggcaccatcattgctagccgttgcgttagagtcgcccaaactcgatgatgaatctctttcaacaccagcctcagcagccgcagcacgctccgcagcaagcttctcttgcttcaaggcctcctctgcagcttgctgtgcctgcaatagttttttcgcagccatcacttcctcgtactctttcttgtcaatcggatccaagtcagcttcgattcgcttgcaagcttgtaactgctgagacgagctgcttccaaagagtttatctggagattgccccaccgcgctcatcaccaggccggccgcagaaacaagctctacaaggctttggacgtactttgagcatacagggacgttcggatattcgcgcaggattcgttcttgcgagaggtcgacaagccgctgcaacggtagggcatctaaggccgtcttcagcctcaatttggtttgctcgtcaatcacctcgatgtcactcttattagcgatcccggatgtctttggcaagatatcttgtagaatcccggcaagaatggttgcgccacgctctttgacacacatgctcgaagatttcagcgacgacatccaagcttgcagcaactgttgccgaatgtgatcgtgaatcggcaccgaaagccttttcttgtgttcctctagggattctaacagcaacccactgatccattctgctaggaagagattgggatgactgagcacctctttatcagaccaagtttggccagcttcggctgtaatttgaagaagggtggcggtaatagcggcttccgatgagttccatggaatgcgagcatattggcgttgggaagctcttttaacctccgacgaaatgcacgaaagaatcgtatccaccagagaattcgggctgcacgtcgttgccgtaattgttgaaagcgtgttgttcaacgccgactgcaccactccagacagcaaacccaacgcataccgacccgtggcaccggagtcgaggagatgaagggcatcaccatcgggtagcgttaggggcgtgctgggcaatgcatttgacacatgaagagcactaagactcgccatcagcttgatgaagtcgataaatcttgcggcatcttcactctcggctgcacgaagagcgtctacgccagacaaaaaggatgatacagagaatggcccaacagcctctgtaggccacttcgcaagcaacgtcaacagcgctcgtcgcgcctgcaagatcgcaagtgagcgcgtgaccaccaccagctcaacatacactcgattatccggaagggccttgatttctgccagggcatctgccttcgtcacgccggaaccagacgcaaaaccactactgcggctatggcctgagcttcggagcatcgatggatgcatatccctagcgaaatatcgcgtgtcactggaataattttcttcgccgatactttcttccagacagtcttctcgggatcctatcacgtcaaagcccttcggcaccgaagtcaggtcataattgtcgctgagcacattcaaaattggctggaatcctggcgggggagggtacttgaatggagatccaccaaggttaaactgcaaacgctcccttcggttaaaacttgcacatgggtacaccccccgagcaaagtcaatagctcggaaagcaacacccatgttggcggaacgcatctttccatttaagctgaaaatgatggtgcctgcatccgcgtcaatgccacaaccaacgacgtcgccttgtttccactttgagccccacggagacgaacgaccatgccatcgttgttgtctccagccgtcataagcccacgaatgtgcgccatcgcccactccatctccgcgatcagcagcaccgcagaaggctacgtcggcccaaccgatttgaatgcagccgtttgtgtgtaaaatcgcttcgtagtaccagcgtccactggaaacaaggcaatcaggtgccccaacactggcgaaaccgccaccaaccaagccttccaccatcaagtcatgctctccgatgcaggcttgaccactcacagcacgtagcgggttgggcattagcacagtgtcttccccttcggggattgggctcggtgcagtcccatcccctgcgtccccaccagaggatcgaagttttgcttcctcatctcgtcgatcttcagcttccaatgcttcgccgtttgatagaatccacgtcaaggctgcatctacgttatttcgattcgcagcgagcgccttcttgcaccagttgaaagggaatcccatctcggacagctgttcgagtagtggactaatcgcttcaaagtcatcctttcgagaagacctcgagctactgtctgcgccagatcctcgggtcgatcgatattctgcaacaagacgctccatatcactactgtgttcaaagcagaaattaatcgcagcctcaacattctgagagcagcgagccaaagccacatcacaccactccttcgggaatcccatctccatcatttgctgaaccattggacccggcgacaagttgtcagcttccgctgattcgctctccatacttttcccttcgttagagtctgcagggggcgatggagcagcgtgtgcactcctaattgcataccaacgggaccacagcattagccaactctcttcaagtgacgagatatctccgactcctgctgtcgtaggagtttcggaaatggcaacagttagcaggtcttttagaccacgagggccaacaccacggatgaacgttgcagcacaatagtcattcttcagcagcgtagcagaagcgcgaagaccatgctggcatagtagcatccgataaagtcgtgactccttctccatttctgccatggcatcagtgggttctgtcggtgaagagttgtcagcattattcttttggtgacgaggtgatccggtagcttcagagtccgactcatcaacgccggcgccgctaggcatttcgctatccatcgccgacggagatgaagaaccatcattggacatatcatcgtcgtcttcgctttctccatcatttgcaccttcctcgtcggcttcgttaagtgcgtccatgacgctcacgtccatgaggctttttttcacttcagccaagaagtacgggaatcgttcgacaagtaaagatttcagcaccgcgtccgaaaaggcattatttggcagctccacttctgggactgggaataagtcctcgatggggacacggactggtcgcgtctatacaaataccataaatgagtggttagtgtgtaaattggtgttcctttgcagttttcaccatgagcacctaccggtatggagcgactcgaaagcagagactgctgttgattgctgctctcatcggtgcgacctccgcgcaacagtacttcggctgcagatttctctggctcataagcaacaatcacacctcttgctcctcggaaggcaatttcttgtaaagatgacccggatcgtggcataatcttcactgtaccgccgacgtgtaggccttcaatgtgcccgtcgagaatgcacagtgcagacagggccttaacgtaactagacgtttgtgcgttccagctctcaagcgagggggtctccttcgtcatatcttccatttcgacatcagagtctgccgtttccgtgacaactcctccctgctcagtaacgcacacttgcgggattgaggagagagcgtcggcaattgcacgattcaaatgatccgcccacttatcagattcatatagcgaacgaagcagcagcactacttcagcagcaaggccaccagcgctgaatccagaatcatctgccgggctggtgtaagcagtctttccagggttgctggagttcgaaagccgatgcagcaatacttccgcgacactaggagggttatttgaccccacaattcccacgaagaagtttatcagcgtagaggcgtggtcaggctcgtcctggccgtcgacatcgtactcatcgtcactgtccatgtcaaaactctcgacttcgtcgtaacgaaccctaatggaagacggatcgagcgaaggcaggagccgacgaagcaacttcaaaattcgtctctgtatctgaggcgagttcacgtcaacgagagcaagcaatagacgcagccaccgagaggaagacaagtgtgatctgcatacgggggagccgcttactgagtacagaagggagcagatctgatagcaatactcctgggcatcgtccagaccatctccggaacccgtctccgatccggacgtacttggatctccggactgcgtaggatcagtcacaaacgctgtagatggagcatccacaggcatatttcctcgagtttgccgcatttcttccaaagagtttttcaactcggtgtacagcatgtggaatacggacttgccgagtgtttcggggcctgaaggcttgcgcaacagtggaatcgaacctaaactcaggcctggagtagccgggaggtcggacgcacttagaagtccatctgccgtatcactggcatgagcaacttgcgcggctagtaggtgcactactttcaatgcagcctggacgattttcttcttattctccgcaagtaaaactgcatcgtcgggagaagtacgagatgggcctgccgaagcttctgtcacggtaatatcgcttgatccccgtgcttcgtccagcacagtttgaagcactctgaaaataccaacgcgcgacaagaacgaatggtcgtctggctggataataattccccacgctagcaaaatgactagctgcaggtcggcatcatgagcccacgtagctctagatagcgacgcactcaggtatccatacaacgactcgaatgaatccctgagatcatttttcaggtgcttcccgcagccgccaagaccactaaggtagtgagaagactcggtgataatgcctgagctaccagtagaagctgccggcactacactaacgccaaaatcgccgaagtccttgccgagagaggcgccacgactgccattggttttaaaatccgctagtgttggtgacagccactgcaacgcactggataacgcaaacgaggattggataacttcatgacgttccgaagtcagcactccgcgcttactaccagaatcgccaacgaaatttcggaaagacagcattccaatcgtcctcaggaacgccgctgtgcagttgcttagcatccttgactctagcgtcgatacgcgaataggagcttccacaaaccgtgcaacttggaccaacacatcgctgtatatacgctcggcacactcgtacactgctgacttcgatgctatccgttgagccccactctccactgacgccagcgcatatacggcctccgcagcagccaacgccttcgcgctgggttcaacctccagcaagaattgagctttccgaatcaccagaccagccacaactgtgtacgaagagcccatagaatttttggctcgaatcgcccactcaataactcgttgagcagctctccagatgtgcattaaattatcgtgcggccgaacgtcactgtccgcaaagttggatggtgagctctcgacgtgtttcttaataaagcccaaagaaccgctgtgccagatcattgcagcacaaacggttcgccgagtagctttcataggctctcctcctagccgcacaaaaggcgactcccccacgtgtttcgaaacccatcgatctaatgctgctgcttcaccgcgattttcgatcaggtctttcaaaagtggattactcacgcgcgcgccagcaatgggcgtgctgtcagcgttaggaagagatgctgacagcgtctttggtagtacaaactgcatccatgctttggtagcgtcggtaagcacaggcaagctgccagcagctgtagcagagccgaatccagaaatctccgaactacgctcaagcacactctttaaatgtgcttggacggtatcgagaggtaatccaccctcaagcaaattgctgcttacccactcgtcgtattcatcaatcgagcactcagacgatgacagtttcgatacatcaccgtcgtcactttcaccaccatcactcttgacgacgtcatccaaactgagggcggccgtactcacgttgtcaacaagtagatcatcgctttccaagctggtcaatgcgtggccaaagtagcctaagagattggcaatcaccatttccaaaataacaagctgattgctcacccactgtcgtccatttgtctccttcgaatcctgcgagatcttgtttcccacaatgcaaccactcgtgtgacttttagtgtcctcatagcttcctgtgaacaccgtaccatcagcacggaggcgcccctcgaccaagcaggtgcctccttggcgccatgtttccacgaacgataccttggttccccgagcgataccattcaacgttaccgttgtaaacgagccactgcttcgaccttgcattgatccgtctttgccttgggaaagagtgagatggtattgctgagctggaatattgccagcagccatgctcttcaactcccactccccagcaacactgagcacaaggttaccaggtgaaacattgtcgccatcttcactcgatgaagccagtgctcgaagagcttggttcacacgctcaatgcattgcatagtgcgaatacaccaaggcacaaaggtcattgccagcgtcgaagacagtccatgatagttccggataaggcttaacgaactgattagaggggtcaccatcggaaacagcagagggtatgaagacactaagcgctcgaagtcacgaatgcgctcacgcttctgaacagcagtgagagctgactgttgttctgacgaaatatccaagtcattcagcgcagggttggatagataagtacagcacgactccaacagggctcctgcgtggtgcaaaaacggcttgagaacagcagggatcgcaacgcccttaggctccatcatctcgccactcgaagatgaagcaaagctcgcgtccgcagtcggctgaaccggcaaaatcgtcacctggtcatcccgttggtacagtccaatcgcaggatataacgtgccgtgctgagttagcccatcaaacgcaatgccccaatcactatctccaactccaaacgaaagcgctccactatcggtattcagccgaacgcgaacaacgctgccggtggtgaaaccatctccataatcgccgcggactttgcttcgggcatgccaaagtgcccgagttccgataagcccccatccctgtcggtcaccacccacgtaggttgcaacggaagcatctctggtacaaactccaagaaaaatgtgtcccttctcacatcgatcgagacgaacaccccactcgtgaataccagtgttaggagggcaaccagtcgtagccatcaccattccccactgcttcgccgtatactgtttagccgttcggtttccatcggaaagagtcatcgtttcggcgcatcgtgaagaatcaaactctaaagcaggcggctcatcaccgcgcgaaccacctagtcgttgaatcatcaagtcttgtaatgatcgaagcaagacaattcgagcatttaaagttggaaggctcgacgaatcgttctctttctcgagaaggggcagtaacggagcgtgcaccaactcgtagttgtctctaaacgagaagttgtgccaccccgtcgacaaaatactttcgcgaagtaagtcaatcagactaggaagccggttgatgcattccagcgcctccgccttttgtttgcgccccatatcccacatttcttcgtatgcacttgccaaggtatcagcgtttagtgcctcgtcgctaggaccactgccggaaatatccattatcgcatccaggagaccaggaggtccatgaccagatatgtaatcgtagaggcatcgcgcactcagagacccagaatcgagagaagcgcgaataacgtcagggctccacttcgctttgatctttccagtttttgacgcagcgttttggagagcaccatcatcgattggcttcacacttgggtcactagcattttgcttcttctgtcctcgctcagtcttgctgtcgtgttcaataacgtcaacacaggtgggcacaaaaagctgcgccatatctggcaacgccaaccgagcgcacaaaatgtctagttggtgaaacttccactcaacgttttgttcaccagttcgagcaagcttaaggcattcagcgagcctagatgccaggagcatatgcctgtccttctgcacgtcgtagaaaatgccaaaagctcgtacccacgctgtcgttgcttgctcgcgaatacgagcgtaataatatgcagcagcgttttgtacatcgaccggggaacatgccgctggagtcgaaaatatgattgagccgatgacatcctgcccagggtcaacttgagagctctcaatagagatgtaattcaggactagactcttcaaactctccaacaacgggtttccgccttcactcgcaccttcatgaggattcaacttgggaatctgaccaagaccaacagaagctggtgcaatgcccattatttcaacgtggaagaagtgtacttctagaactcggaagagcgaaagcatcgagcatgacgaaaacaaacgccacttagctgcccagtttgggttttcagcccaccgagaatggggtgccgctgaagcgtgcagatccctcaacaaagaattcaggagcatgaacgtcagtggatgcggctgaacgggtgatttgttagggagaacaccctcctggcacgacgtcaggtattccatgcacaccttagtcatctggactatcagagccatcaccacagtagctgcatcgacgtcagctacagagccatccgggagtgcaaacggaccaagctcctgcagctcttcagcagaaaactttggcgggcgagttttcacaacaggcgactcattttcgtccgtaatatctccatccggcttgttctcgctcttgggagtagatggagcatcggctgatgcgttttggtccctcaagttcacctcgggagaaagcgataaagcaattgcgcgtgccatcagcgcatcttcatccacgccttctcctccaaggctgtcttcgccttctccacgctcatcgtcatcatcatcgtcgtcgtcgccatcatccccatcatccccatcgtctccaaaccgactcaatcgtgcgcggagcttggcaattgatccagtgtccgagtccaaatccatttcagcagaagctgcggcttctagaacaacattctgcaagtcggactcgaagttgccttccgcggtttccagcgtagtatccgccatagtttgatccgctttcgttggcgtcgagacttcgttcgttgtcgacgctgccgctgtagacgccctcttcggcttatattctggcgctttctctcctcgcagcacccgtagatgtgaggccagcgggaacgtgggcggttcggtatcattcgccttgttctgatggcccaggaacgacagcacaagcttcgccgccagcatgaggccctgcagcgatccttcagcgatactcttggccacaaagcgactgatgttcgtcttcatgtcttcatcagacagcggctccgctgccaagtccggcgtcagcatccctgctccgatgccggtctgcgagggctgcttctccttgcgctcccggtccttccgcttcttcttctttttcttgtccttcttcgggtccacgcctgtgaccagggggtggcacaaaatggcgccgtacagcgcggggtcctgctctcggatctggcccagcatcacgttgtacacgcggttgtccagcttgtccttcagcagccgcgcgtgcagcttggccaggcgcttctccgggtccagcgcttcgtccttgtcgtcgtcctcgtcgtcggcctcgtcgcgctcgtcgtcgcgctcgctgtccgcctccttgtccttgtccttggcctcgtggaagtcgcggccgccgcccagcgcgaactcgatgtccgacttggcctccatgaagaagcgcgtgagctcctccacgcgctggcggcgcgcggcgtcggcgctcagcaggtcgtcctgcttggaggaggaggaggacgacgaggtcttttgctgcgagtcggcggcgcgctcgggcgcgcgctcgagcttgacgggctcggcgcggccgctggcggcgaagaactgcagcgactcggccgtgatgacgctgctgcggtcgctgcagagcgccgcgagctccgccatgaggcgcgcgtagcggccgtccagcgagtccttctcctgcgtctcctgcagctcgtgcaacacgctggcctgccgcagcagacgcgtctgcttggcgcgcgcgctgctgctgctgctcatgctgctcgggggctcgccgcgggacgaagagtgatggtctctcggctttctctctgcttcggtctccgtcggcggcggctttttctcttgctaaagtgtcggtcgtccccccttacgatcttgcgcgagttcggctaagtacggcgtcgcgattggacgaaagggagcttgaagaggcgcgagtatcatctatctgccaagatggaggacggcgccgaggcggacgtctggagcagcttcgagaagagcgtcgcgtacatgaaggaggtggcggcgctctacgagtcggcgttcggctgcagggcggatggcgccaggaagaccgtcgtcaccaaggcgcacctggacgaggcgcacaaccaggcgcagcaggcgctcgagctgctgtcctccaacctgctgaacgcctccatgaccgtcatgaacgcgatcgagagacaggtgcgtggcagtaactatgtcggagccacggcaaccgtctgactggtgctctacttgggctgtctaacttcgccccaggagagcgaggccgaccgactcaagcgcaaggtgtcggccattcgcgagagcattcaggaccgacaagctgagctggaccaacaagccgttgacaagttttatgcagctcacaaggcgagcccatcaatgtcgtcgcgtccggttatctcagcggagcgtacggggcgattcgaaaaggacccgccgcagcgtacgctttcacgtgtgctacctagtgtctggggtgctgtgctaattagttctgtgtgttttttttgtgtgtgctgcgggtgctgtccgacacagacaaactgagactatccctcgctccgggtcaatgcatgcaataaatcatactaacttcctattattctcgtcttctagcgtcgttggctgcgctctgtcgagcctggattatccgattcctcccttattcgccctggtagtttctgagagccatgctttggactcgcaacctttatcacttttgtctccatggacttggatggtcgtggcatcgctggctcggattgtcgccgtttttcctttcttgcaggggtgttcgttctcttcaacgcgggcatcgactgtattccatcatccagtttttcttggccaggggtgttgcccttggccgtttctgagctgtcagcgagagtgcgacccggtcgatgcgaaaaggggcgaaagcctgagcctcgcccgtaccagctcgacacggaatctaaaggcttacgttgcagctgtctcccaatgtcctcctccattgaggtcagcaatttggagctggtctgccgcgacaacatcgtcacctccttcacgtgattccagttcagcgcattcacgttgagcgagcctcgcttctcagtcgcgcgggaccaaaaccgctttcccaacaccttccgctggatctccatttgcaactcaaacgcgggaaaaagcagcatcgggtgccgcaccgcaaactcctggaacagcgctgcagagaggcggttgttgggagtattcgccataatagcgtccagtttctccacgatcttttgcgcgcttgagctggtttcccaggcgcttccccatatctcccgcacgcacctcacaacctcgtcgtgctcgatctcgccactcccatcgatgtcgtatagatcgtacgcaaaccgaaccaagctcgcatggttgaaagagcagtagttccaaacggccagcacaaactcgataaagtcgacctcgccgctaccattccggtccatgactgaaaacgccttctccgagaagcgactgcgctttagatctgcatcagcagcaacaagttagtacagagctcgctcatgaatactggatatgatactgtctcgaaccgatgtactcgaaaaactccatcaaattaatctctcccgacttgtctgcaagcgcaacaccaacatcatttacatacaatgcaagtacggcgtcacattaccccatttcgcacctttgtccatggcggagaagatctggtacagcgcaaataggtgcttgtgatctagcccgagaccgcggagtgtctgtagcagcgtctcgttaaggtggagagacttgttgaaggccttctctctcgcgtgcgcaacaacgccacaggaggcgaataaatttcccattccatgagggagtggccgcgactacgtctaattgacggcgagcgggagggggcaatgagtgaacttgtgcgcaccttgcatttcgtagcttggctcgtagatatttttacccagagttcttacctgggcacagaatagcaggacgtagatcctcaaattgacgcgaactgagccgaatcattagaagcacgatccatttgccagtcgtttcgctcgtggagcttgcatggggaagcccaaaggtagatgacttgctaaggtcgccgttagtttggcaccatgagcttacccttcactgaaatgcgcagtggtttggactaatacgtatcgttttcagtccatacattgcggtgagtaaacgttcgtcaagctcacctcaactttatgttgtgtcgtttcactatcgggttaaacaggtggtgggtttacgggtttcgacccatattatattcgacaggtttttaagcccgttaaaaatgagtggcgccccaggtccaacaacgtcgacggtttgcttgttgctcctcactttcagattggacagcgaaggcgacggacgccacaggatattttaacgcgtagcggaggactttttgccattcggagcttctgaggatgaaaaaatacactagccgtcgagccgtccattggacgtcaatgtggcgctaactaaactctaattttttcctgaagaacgccaagccaaccggtatctgtatatgtatacgtgttgcatgttgttgccaccggggttccaatgaggaaaaacgtaccaccacactgatctatacgatgagaaatcttccatagaaatcaaacttttactgaggaaccccatccaagatagatagctggtagtgtattttctgcgtatgttcatgtgtagaggagatcaatgcgcctaagcgctaaatacactcaatgcattgcgcataactgatgtttacctcttccgttgatgtgaatatactgcctgctgctagtgtacagccccattggcatggaggcctctgtggcagtgtggactagcgcacacgtgtatgcagcttaactcattgaggacgcttgcgggcaaccactgcggaaccgtggtctaccgtcagcagtggccatcgtgacaaaaaatgtcgatgggcatgacctcaacagcagcgaaacttgcatgtagctgtgcacttcctacgcttgctcttgcagcgacaatactagtataagctaagcctttccagatgctgctgcaggaagtgggcggagaagcttcagcctacgcgtccgtgctttgattcgacttcaacgaggtagacggcagatccaatagcgtgccttcaagtctgtagccgcacgacggatacttcataagcgacgcgccaccaaggtacccgactgccagtccatcgtcggtgcacacaattgcgccgtcaggaagaccgtgggcagacaaattaaactcgccccccatcactccagtgacttgagccggaataatggcgtacggaggtccgaactggtaaggaatgctgcggaagagatacgcgtggaccttcatcgttgggaccactccaaaagaagccatcttgcacgcagcgagccgatcatcgcccggcatggccaccttgaagacggcgaagtccagatccgccgagcttttccagcacacgtcgctctcaaggccgaactcgtggattgcttccatctcgttgtcttccggattgagcttctcgaccacaatacggggtttatccgccccagacgcccgcgaatgctcacctttggcactcagaggatggagacggagaaaacgtacgatctccttcttgaagtcactgctcaagtcaccaactaagcgctggtcgacccacagacccaagttggtcatcaggtacaagtgcgtcggcgagcgatccacaaccaaagcggtcgacgtggtgacttccttggatgaaaggctaaccgagatgcggacgaccgacttccacacgttcatctgaactcgagggtgcacagtcgccagctcttctgcggaccaagtcttgctcttcttcactgccgaagcagcagcggtgtctggaatcttgacaaggaggtggaggtcttcgcctccagcatcaccggcgtctgggaaggcaaaggcagcgtccccgatactgaagtccgagggcagttccgtcttctcagtcgtgatgcgattgattctgtcgggaaccttgccaagctccagctgcttcacatcgaagccggtaagcttgagccactcgccgttttcgtctttggcaagatgcaacgtcatccggtgggccgggaactggaagcccatcttctctttgattgctttcttcgcttctgcgatagtcgtgtgactctcagtgtccaaagtgaaggagcgaccttcttccgccaccataccgttaactgtcttcatggccgtgtgggtcgagttagagcgttgagttggcggaagcgaattcggaagtgaacaggggattcgtgagccttttcccacaaaatcgggcggtatccaactgtaacgttgtctagcgtcatctacaggtacctgcagccttagaatttagcgccctgggggtcgtttttcaaagcgtttatttgcctccatcttcctgactatactgctacacttgagtgggggtcattgccgaagcgcttactgcaatgcacacggcggcgttatagataaccagcacgcgatacagctcgactgggtgtcctccgtgcattctatttgggcgctgtgaacttggccttgctgtcttcgcccgtgagctgcaacaccttgtacgggatgttggtctcgtccagctccttggcgataccgagctctgctcgcagagtgtactgcgaaatgtagtcccatgtatcaaagtgcttctgcatttctgggtcgggatccgcgtaccagtcatctgtgcgttcccgcgcattagagcgttagcaaaacaatgcatcataccaaagggccatagcaatacttacgtcgaatgaagtccttgtcgcgcatgtcgaagtgtgacatcatgtgctcgtacgaattgtagattttcttgtcggtcagcagcggcagcgcaggcttgaatttggggtcaatgtgcttcatcatgagcttctcccagtccacggtctcgaagaacgggtgctccataaactccgcgaagcccttctcggggttgcagcctagtcggtgctccggcgacacctccagcagacgcttcaaaaagtcctgcgcgttccgagtcaggtgcagcgggaaggtgacgccctgtgccattttctgaagctcgatcttgtgttgtgttcgcggagacaatcggaaaatctcctcgttcgccacctcctggaagaaattgccgctcgagtgcatgctgaacggctggaagccgcacatcagctcgaaaacggtgaccccaagagaccaaaagtccactgcaaacgtgtacccgggccgctggtcgcgctttacgagcttgcccgatatgatttcgggtgccatgtaccctcgggttcctactgtagtcttccgtcgcgtgagcttcggctgcactggtgtataccggtagtcgcccgagtcgtccttcttcagcttcactgggtcgaaaccagcagcgagacccatgtcggccaagataacatgcccgtcttccccaagaagtacgttaccaggcttcaagtcgcgataaataagccccagctcgtgcatgtggttgagtgctaggccgatctcagccgcgtacagccgcactcggtcttcgtgtaggtagccgtcccgagacgatttgagtgcatcccccaggtcgccgcctcgaacgagttctgtcacgatgatggcatgcgccggcgtctggaagctgtagtgcatgtccagcacgaacgggttgtggcagatctgcaaaatgtccttctcggatgtgatctggcttagttgatcgtggtgctcgtccaggagaccggtcttgagctgaatcttcatggctgttagagcatgagtaacgctgtcagaccgctaaacccatagataatgaatgatgcgtctagagcttaccgtagtgcttgcccgtcgactttttgcgagcgtggacgacccggccaaagccgccactaccaagcagctccaggtattcgaagtcctcgatcgtgaccttgttgtacgtatccttcaggtctttcttgtacgcctcatactccggcgaggacttgaagcgcataaaggtgttttgacacatatcggccacgatgtttgtcatgagagggtcaaagaattcgaccgtcgcgctggagccgtggctggcctcgagctcggcgatttttttctgcggtccaagacagagcaaaccacattatcgtgaccatcccagccccaaacaacaattatcaagtgtgcactcacatcgtagagcgcgatgaggtcggacgtgatgcttccgagcgccatggtcgagccgttcttgatgtacttgcggtagatgagtttggccatcgacttgcggtacccgatggatggcgcctcccggaactccttgatctcgacccagcagaagaaggtctcggacgtcaggatcttcttggcgaaggcgccgatgtgcttctgccccacggggtcgtgcagcatgtgcagcagctcctgctcattcgtggacggctcgccgttggcccccacaaagggctgcgcgattttccactgcgtcttggccgccacgagcggcacgtggtgcggcttgttggcgaggttcaggaacgcggccacgattcgcgacggggtctgcagacgcatcgcgccattcgggtccgtcggcacggaggctccggcgcccatggcgattattgcccggtctatcgatcgatctcttctctcctcgctcggattccagcaaggccgacgtccctcaatagacggtgaaaccaaccgaaccgatgaacttcacaggcgcgagcaaatatagcggatggcggggcttcccaggcaccgcgtggcccactcttgctgctgtatttacaccaagacctcgaggcagggggcaagcgccccgaggttctgagcgcgagccccccccggctatttttcacttgccaggctgctggcagtcgtcatggctcacgaagtcacgaaatcgagagggcagacccaggaggaagcgcccaggctggaccaaaacagccacggccgacaaaaagcgcgttgaaaagtacggcagtggatctgtggtcgtggcacggcaagtcactcactactggtagacatttgatcgacctcgttggcgtctgcaaattgtaagctatcaggctggaacatcctgcagtgcaccagcaacacatttcatttcatttcattcatggactcgagccgtaagtgctggaggtgccccgctctcaggacagaaacactccaccacaacactagcgaaggaagcacagtgagcttcaacttgcgccacgctcattccacccgaatagtggaccctctttcactcgaacaaagtatacaggccaagcttgtcaaaaaagattcctcccctcgcaagaagcagcagcagcaacgctaaggtctccgctatgagtcgacgactgcgggcgtcgctgcgtctgctattagcgctgctctcatgcgtctccctctgcgccgccgcctcctcctcgtcgtccaacgccaccagctacacgctgaccatgaactcggtggacgaggacttctgcgactcgaccaagcagctgagcggctacttcaagatcgcgggctccaagtccaagaactacttctactggttcttcgagtcgcgcggctcgccgtccacggaccccgtcatcatctggctcacgggcggccccggctgcagctccatcctggcgctgctgcaggagaacggcccgtgctcggtcaacgacgacctgtcgctcaagcgcaacccgtactcgtggacggagcgggccaacgtcatgtggatcgaccagcccgtgggcgtcggcttcagctacggcgacgtgagcgagtacgacacgacggagaaggaggtgggcgacgacatgttccacttcctgcaggacttcttccaggccaagcccgagtaccagaagcagcccttctacgtcttcggagagagctacgccggccactacgtgccggccatctcgcaccggatcttcaccggcaaccaggagcaggagggccccgtgcacatcaacctgcagggcttcggcatcggcaacggcctgaccgaccccgaagtgcagtacaagtactacccggacatggcctacaacaacacgtacggcgtcaaggccgtgtcgcacccggtgtacctggccatgaaggccgccgtgccgccctgcatcggcatgatctcggcctgccagaccaccaaggcggcgtgtcttgccgcgcaaactttctgcaacgccgctctggtggcgccctactcggtgtcggggctgaacgtctacgacgtccgctccaagtgcgagcacccgcccatgtgctacgatttctcccacgtggagaagttcctgagactggagagcacgctgaagaagctgcacgtgagctccaagagcgccaaatggcagagctgcaacatggaggtgcacgcgggcttctccttcgactggatgaagaacttccagcagctggtgccgccgatgctcgaggccggcatcagaggcctggtgtatgctggagacgccgacttcatcgtgaactggatgggctgcaaggcctggacgcttgagctgccgtggagcaagcacgacgagttcctggcggcggaggacaaggagtggacggtggacggcaagaaggctggtcggatccgccaagtcggacccttcgccttccagcaggtgtacgaggccggccacatggtgccgctggaccagcccaagaacgcgctggcgctgctcaaggccttcacgttgcccgaggagcatcagcaggaggtggcggacgaggcggagcagcagtggctcgacactgaggccatgatcaaggacgagagcgtcatgagcgtcatgtaaaactggctgggaagactgcacaaaccaaaatgtacgcgcgcgtgtgtgtattagcgagcctccttaactgttcggaagccactgcagctagccacaactaacctgaatgcaatatcaaagcggtttacgcacgaccagcgtgtagcctccaacgttccccgcgtggaacagacgtgctacgctcgcgtataaatggtcgagtcctcgagctgcagcctcgccatcacgagcgatatgagtctccagtgtagcatggtactgcgtagcgcggtccgacaggtacggctgccacttggtcgtcacgtcctgaaagctcggctcctcaaacccgcacgcactcaacacagcaaaaagttcgtcttgatgcagcaagtcggcgcagtagatgtccgtcttgagcgtctcttcctcctcgcccgtcaacttgtcaccacgcaggaagaaatcgtcgacgtacaagaccccgccaggcctcagactgtcgaagcaccgctggaataggtctcgccagtgaccgatgtgcaagaagcagagcagccccaccactgcgtcgtactcgttggcaagcaccggaagcgccaagaagtcgccactcaagtgcgtcacttgctcgctcagtccacagcgtcgtgtgagttctgtggccgcctcactcaggtcgggctggagctccagagcgtccaccttgcagccactgcggtgtgccagcagccgagccgtgcctccgaagcccgtgccaatgtccagcaccttcttctcctctggagtctcactcagtagctccacgatgtggcagatcggctcgtcaccgaaaaaatgcagcgagtccagcgtggccaactgctctgggtcgactgacacgtccttgctggtgtagcccaactcagccaggcggcgctcgatgcggtccaagtgatggtacagcttcatggtcttgatgtcctggtgcttgggcatgttgttggtctcgatagtgcgacttggtacggagctcgtcaattgcgaagtgaaccggcacttgaggctcgagctaacatgttcgtttgccgtgttcaacacatgttgcatcttccaccaattgcgcggaagttgaagcggattcgtgtcggattatgctgtttgcagcagcgaagattggaacggcggtgggctggcttcatggtttgccggctatcagtaacggagacaagtgatggcactgctgcccagcggtgctagtgatcaagcacatggttgctgcacgttggtgacggccacttgaagaccctacgaaagtataatcgtgaatctactgtagactcttgatcttgaagactacgggacggcatcatcaatgcatgtttcatgtttctctagatgccttacaaaacgcatccaacaacaacttatgaagttcgtgagcttgcacggagttgatgttggtggcgacaaagttgcttcacgaaaactgcctacgaaaacataccccgaagtgctatctcgaagggtcggtgaagtcgcttcgacccgatcgatggaggacgatcaggacccaacgcagtctaatgcttgggacggctactacgctcaagagcagtcagagcagccacacacagaagaccagtgggtcgagtgcatcagcgacaatggcgagacatactacaccaacctgataacgggggaaacttcgtgggtcaggcccggctcggaggtagagcagagctaccagtctgctgcttggactgaggaccaaaccgaaggagttggagaaggtgctgcgactcaatacgaggccaccgagacttcggtctatgcggacaatgacttgggtatcacagtgcccaagtctgacgaagtcacccaatggctggaactctttgatccggtccagcacgcgctgtactacttcgcgccgcagtccggtgaagttcgatgggagccacctcccgacggctcagcgctcgttcgacactgcgatagtgatgcagtgttgagcacgatcgtttcgctgcaaagggctgcgaggtcgcaacaagctcgggctcgagtgacgacgctaaggcaggagaggcttcgagagaatcaagaggaagacaccgtgaatggattacaacctcctggagaagtcgacactggcacagctcctccaattgataatgatccgacgcagtgggtggaagtgtttgacccggcaacgcagcagcagtattactacagcccgcgcaccaacgagacgcggtgggacgctccggacactttcgtcgcttcctccgaagatcgcaaggtggctgcagctatatcgatccagtcgctgtctcgaggtcgtcgagcacggaagcaagttcaccagcttcgagcacacgcgccacaaccggagaagcaccaccaacatttgcacaatctacttgaggatgactccgagcgagaagcaatgtgccgacgagagatgaatcaccaggagctgctgcagctgcagggaggcgaccaattctggggcctagatgcccatgagcacgaagtgttgcaactgcgtcttgagcaagagatacttgctaggacgaaggctgtgaatgggcagagcgctacgattcagtcgcctcattcagaccccaccgagacagccataccccggattgagtacccggagtttgaagacttcgacgatgtgatggactcagagcggcagcagcaagagctccaagatgaacatgatgctcgcacagcgatgtcccaagaagaggccgagcaatgccagaatggggacagcttttggggtatccagacagaggaggctagacaagaaggtgccaacgttgctatggctcaagaagaggctgccagccgtcagtttgctgaaagcgtggtcgagcaggctctcagcgctacgtgggaggtcgaagtggtgcaaaggagtacgaaagaactagctgcgcgcggtggactagagcagcgcatacaggctcgttatctgcgctggttctacggccagtgcatttccgttgacgagttgctggactatagatggcctaccaagcagcagcaagagagactcgaagaaacatcctcgcccgtcaagaagcgaagactgcccgttgtccagccgtacgaagaagttgttgggtcagcaacgccgtatccgctcgacgacttggtgtttcgtgaacggttagagcgcggtgacttgcgctacgggcttcgatcgacgttgacagttcatcaccaaggtatacacggcacgaaaggcacgcgcttcgagataaccatggccccacccgagtgcgcttttgacgagcccacggctgcagcaattttgcgaagcgaaatactggcattttcgtccgatctgcaagaagagggaccgctcgatggtcggtacgagcgtcaggacgatcatgctgcgggtggagaattaatgccggggtcttcagtcaactatcgtcgttctgaggtacgctgctattgtggaagtggtccgctaaggtccaagatcagcactaactatgagttggtttgcctacagataccagatccgcacatcccagcgagattcaacggtgttccatacaaaccgaaccaggtgagcagcaacgcactttcaccaagcaggtcgcacattgccttacgcccctcgtgcttacagatcagtcctactcgggatattctacgcggggaccatcgaaaagtgaaccagctaccgtccctatccagatcaaacccggcagcggaaggcacaaagctgcggcacttgcagaaatcaaagaccaaagcgcgcgcgaagtccaaagcaccgggcgcatctgcgcagcagaagcccaacaacggaaacaactctggctcaacacgcggactccaagtcgatatccctgatgagcgcaccgacacaacggaggaagatcctagggctcagttccagcgacaagaacatcaagtcttgtcgaaactgttcgcgctcatggatttggatggaagcggcactgtgaatcaaagtgagatgaggtgggccctgcagcgcgatgctgaggtccactcccttgccacgacttcaccgctgcttcgcttgctgctgaagcagcgcacccgtctcgaagcccttttcacaagtcaaactgtagatggggatgcacaagacagcaacaccggcgtagctactcgagacgagagcagcgatgaactctcgtgggacgagtttctagcccggtgcgaacgctcgtatatctgtttgatgactgaaggtctcatccaacctgacgccatcactactgcaagccgagctgagcatcgcaacaatgcccccaagagctacgagcacgtcgatccgtccgagagggaagcagaggcaagaacgatccggcgagtgtttgcattactcgatatcgaccaaaacggtgtggtggacgttgccgaggtccggagagctctgtacaactcggccgcgaactctcataaaggtgcttccagaccatcttccactgcagtttcccgagaacttcgagctctggttgagggctccaaagcattgcagcccatgctgcaccaagagctgttcatgacagcattcacaaagtttgagccgctggacccgcgcgggatcagcgaggaagagttcgtggctttctgccttgagatcgcacaggtagctgctgccaataatatggcgaccagcgtaggatagcaggatgtggacagccgcaatggactacacgacgtgggatcatcctaggagttttgctttggctcttagcattggctccagcacgtcgaatagtgcagcaacagcgaggcgagcgcgaggcctgtgctcagggttggcagatatcgctgtgatcggataaaatatacagcatggcccactccgccatgcgagtatgttaataccttgctgagatttctcctttgtcgacgttttgctgggaatatttttccacaccaattgatcaagtttcgccgagcgctcttgagtctccaccccactggcaaaggtgttcaagactggtgcgaatagcgataatgccgataattccacgaacggcagtagaacttcagcgaaattgtaagcagctccagtccgatgcggctccatcagacccacctttcgcttattccagcaaatctcaagcactcgttgaaattcacgcggctcagagtgactcatcacggcgttctttgctccccatttgctcttctttttgggtttcttcttcttgccactgctaggcttggtaggggccgaaatgatggcacgagtagacgccatgatgtttcgaaagctaatattctgcgtgctcctgcgggatatctcggcgagagaagggttgacagagcgcacagcctttcgacactcctcctctcggtcgtccacgctcgccactttcgtgccgctatttcgcttgtcagcctcatcatccctctgaatgtttccagctgcatcgtccaggcgacccgagtagtagaaaaagaggaacgtgtcttccggtgctcctgcaacattttgagcgcctttcagttgagacaggaaaatgtcttcacttaagctgatgagctggtgctcaatcacttcgtcgattgcctgagagaatgcgtgacgaaagcgacgagactggattgcacgcaaggtaatgtcagcgcaccagattcattcacaaacagtgtcaaagtcgacttacaacttggttcagcgtggtcatcagctgcatttcgacgctttccccattttcgtagttgtaggccgcgcgacggaccaaccacctgcgagaaaggtcccagaggagtggatcaatacatttcaactcaacataacggctctaaggacctacttggccacgctttcgtcgaagtcgggctccgtgaacagtacctgttggtgacggagagggatggattaaacgacgtcacatactaatgaacaaaataaactaaacgaaccacaaggagtttgttggatggggtgactgcgagcaccatattttccagcggcgtggcaaacatgacaatctctgcaccaattgccgaatcatcgcttggggcgttgttgtccactgaccgggtgctacttcctagcgaaaaattcaagctaagcattagtttccattgagcatacgacaagaataaacgcagctttctcatacccgcgaagttttggagcgcaaagatgagtgcacttaggttgagtcgctcggtctttgggtgccgcgcgtcgaacgcctcggagaacgatttggtgtagtgcaaggcccctgaggacatctcaaccagcaccactccttccatcagccctcaacggaacgtgggctcactgtttctgtcggagttgtgatctccaaaggctccgtcaaaatagcgtgagacgagggagatgctgttgctggcggtgcttcaaatgttatcctgataagtatcagcagtgtgcctcgttagagcaactccaaacttgcttggaccaagcgccaacagccctccaccaacatcaccactcgaactacaactcataacgctggtatttttggcgatgtcaatgctgcatcgaggggtttcacttcgggaaccggcgcgccgatccattagccagaacacaagtccacagtcacagcaagaaggtatccaggaagtatgccggaatcccagcaagccgaggcccagacagcggaggcccagacagcggaggcccagacagcggaggccccgcaggttgatgcccccgtggccgtctcggacgtaaacgtcatcgccgtcaaaccgcacaagtcaaccaagaagaacgagtaccgggtgctctgttgcggcaactcgtggcaagacctcctcatcatccccgtgtgcctcatgggcgtctacacgatgctcggtgccatcttcgcgctctgcacgcgtgcagtgctgcagacggacgacaccaacacggcgctctggacgttcttcgtcttctacgccttcttcctcttcatgctcgcgctcgtgctggcggctgtagcgtacaaccgcaagatgctgaaagagcacgaagacgccgatccggaagagctgtaaggccgagagccacagagctaccgatccgtgactctgcagcgcatctcttgctggatggccatctatccagccttcgcacgctagggtcatcgaagctaagtaatactacccccatacattcattcagcgagctgcagtcgtgatttattacaccttgaagcatgctagcatctgggcttgttgggtctagtagccccatgaccacgcctttcgggattgctgctgctggttacagcgctgacagatacaacgttatcaccacggatgaaaagttgtttgatatactcgcgttgagtgcccccggcactggcaagaacgcgtcgattccaacgacgatctgctgccgagaagacggcgtcaccagcggcacgattgccctcgcgcacttctcgaagcaacctctcgtgggtgttgtgcgggacgaactcttgcgtgacatccagcagcacgaggttcatgtgcttatcaaatgccttcaggaagccggaacacgtcccacgcacgctgttgacacgacgcaccactacgaacacgcgcattcgctccagaaagcagcgacgcagcactcgaaaaggcccctccaagtacgtatctgccagcatgcaacatcaaacacagataaatacgcagctttaaagcccagccagccggatcactcgttacctgctagttgttcgaacagtgacggcgtagcagtcacagcgctcgtcttcttggtcactgccgccttagcctcagctaccgacgggctcgccttcttgggtcttgtaaccagagtctgtctgctggcgtccgactctggaagctacaccacatcaacacaaagtatactactgctggtaagtctcaactctcctgcaccctgcattcgggaacttcttaccaaatgacgacacttttggatattatccagtggatatgccgtcgccacgggcaagttcaacagctttttaggggcttgaagcgccttgagagcgtcgaactgtgccgagcgaaagtccagtggactgctggtggctggaatcagtgcgtatggcttgaaatctctctggtacttgaccgtaggctgcggcttcagcgcctttgcctggccctcgactccttggtcgtcattgtcacccacagacgtgaggtctggtgcttctccgtacttcttgaagagcttcgcgcacagttggcgctcccgaccggcgaatttgcgcacgatttcggcgctacaaggtcaaaagagcagacacattaggatcagcttggctggactgcacgacggcaatagatcaagcaggcagtgatagaaaatatgttacatcaaaactctaaattagagggggaggatcacgcacatgttctggtcattgcctgggttgtgcttcgcgtagaaggcgcgcagccgcgcctccatctttgcggtctccatgcggaccttggtcgaaaggttatcacacctgcttactttctaccaatcatgttaatttcccgctaacttggacgcaattgaatcgcttttccgcccaatcaaatgtgataaaaatggactcatcagaataaatgtgtttaaaaacacatttattctgaaaagtttgcggttccaggtgaatttacgttacctgaagtgcctcgagaaactgcatcttggacttttttccaggtttcaggttccaaatttgctgtaatcgttttttttgcggctttgcaattataatactgtaaaaacggtaactatgccccgtggggtactgcagcagtgcgcccttacaacctgggacatcattgcaagggggtactaataaaggggatggggcacaacaaatgtccaacaacaaatcacattacaaaagtcttacatactgaaatacagtaacgttgctgtacaaacaataggagtatacttattgatttgagacgtatggaaacagaactcaaaacctctgaaaaatctcaattttgcaaaacaatcggtttatatgcggggtgggtcactttagcaagttccaagccaaacccacatttttcatggggtggatccgtattggagacttaaaaacttccttgttgttgtaccgagaaaactctcgcgttaaacgttttgaatcggattcaaaatctaagaattgcaaaattatgggccttcacactaatactaacaatacaaaatctttactgaaagcttagtggaataattttccaaaatgttttgcataagtattttctaaaatttacaaacaaaaacattttcaaatatttttctcaaacattttgatgcaggaccgcgtcaaacagacacaggcaaaccataattggagatttttaaaataatgccatctaaagttgcacctaaatcaaatcttggagtttaccggacatccaacgtgtgagagtgaaagtcactcgtataaatcgtaaaaacacgttcggttacccggctcattatccttgccatgaaaaagcacgacgaaactaagacgccgcagctgttagtcacaagtgttcactataactatcgcccatatcttggggaaatactggcagctcttcctgccgctgctgtcggtgctcgcccgcttgtgtggggtttcctggccggaggagcagtctcacgatgacgcgtcagtacccttcgacaacgacgtcgaggacggtggctacggcggtacctacgtcgcgctggttgacgacgagagcagcctggccccgacacgaccgaccacggctgctgaggtgcttcatgcgcgtcctagcagccccaaggagcctgctcggggctctgatgtcgacgagtggacgagtaagaacgagctcgtcaacgcattggcaacgagtcagatctgaagctgcatcccaccgaacttggccgagctggacgaggcaacgcttgccaggactatggaccggaggcccgcgcgaagattcacttctacgccggcgctggccatcttccgcagcagcgacagatgttgcgacaaatgccggtgccttttgtcgcaggcggtcctttatggactgacgcagaccgagagacgcgcgatccattacgtcataacgaagaacaccgcatatttgttggacgagtcgctggaggcgtatacgctacgatcacgggagctcgttgccgctactaacgctaatacctacggtatgtggccctcatccgcgttgtattccggcggtaagttctctacgtaccacgacccgccgtccggtggacaagcgtctggcgttgtcgggcgaaccaaagatgtaaagcgagcgtgtctgcgaggcggatgggggccagtgttgtcgatgacccaagcaaatagactcagcaggaagaaggttcgtgagagtagcaaccgaaaacaaaagtaatatgcagttttaagccacacaacaatgtgcagctagtgaatcgtgttcttgctccgaaaccgacgtcttctggtgtgctcctagtgagtcagcatgaccgttgtcacctccacgtaccgccgtcgcgaggcagcttgaccgttctcaaccccgtcatacgccgtgacttgtgggcaagtcggtactctgctgttcccggcgcaggaaggcggcaattggtctgaccgccactgatgctctctaatagcctcagtgagcactgaggatggcgccctcatcttcttccgtacccgcaactctaaccattcacctcagcagccttcatttgccccatcctctcctggcttgcggctttcaacttcttcacagtaccaatgtcggaaccgggtgccgtcgctaggtaggcaacactttgcttgatgcgatcgatccgggtcagttgcttcgccgccgtaaggtcaagccgcggcttcgcgacgatgcatcgttagcctgtgttgttgcgttggtggccgcgaggatcgaattctcagaactgagcagttgacgttataaaatctaacgtgtacagtattaacatacttgcccaaatagaagcacttcctaagcaatacggtacttaacgtttcccccctataatcgccaggacagcgtgttacagctgattcaatgtctaatattgcaaacttctaggccttcaatgtacaccatttaaactaaaatgccaaaaacttttactaaaagtttgatggaattatttgcctaaaagtgcagtagacttattttcctaaataatttgcattattattttcctaatgttttagcataaaacttttattaacaaaaatatcaaaaatgtatgcgagaccgcgttaagcaaatagatgctaagccaccatttgagacaatcgcgtttgaagttgcgctgaaatcaaatgttggagttaactggacattaaacttttgaaattgaaaatgacttgtataaatcgtaaaaacactttgatttgagacgtatggaaacagaactcaaaacctctgaaaaatctcaattttgcaaaacaatcagtttatatgcggggtgggtcactttagcaagttccaagccaaacccacatttttcatggggtggatccgtattggagacttaaaaacttccttgttgttgtaccgagaaaactctcgcgttaaacgttttgaatcggattcaaaatctaagaattgcaaaattatgggccttcacactaatactaacaatacaaaatctttactgaaagcttagtggaataattttccaaaatgttttgcataagtattttctaaaatttacaaacaaaaacattttcaaatatttttctcaaacattttgatgcaggaccacgtcaaacagacacaggcaaaccataattggagatttttaaaataatggcatctaaagttgcacctaaatcaaatcttggagtttaccggacatccaacgtgtgagagtgaaagtcactcgtataaatcgtaaaaacacgttcggttacccggctcattatccttgccatgaaaaagcacgacgaaactaagacgccgcagctgttagtcacaagtgttcactataactatcgcccatatcttggggaaatactggcagctcttcctgccgctgctgtcggtgctcgcccgcttgtgtggggtttcctggccggaggagcagtctcacgatgacgcgtcagtacccttcgacaacgacgtcgaggacggtggctacggcggtacctacgtcgcgctggttgacgacgagagcagcctggccccgacacgaccgaccacggctgctgaggtgcttcatgcgcgtcctagcagccccaaggagcctgctcggggctctgatgtcgacgagtggacgagtaagaacgagctcgtcaacgcattggcaacgagtcagatctgaagctgcatcccaccgaacttggccgagctggacgaggcaacgcttgccaggactatggaccggaggcccgcgcgaagattcacttctacgccggcgctggccatcttccgcagcagcgacagatgttgcgacaaatgccggtgccttttgtcgcaggcggtcctttatggactgacgcagaccgagagacgcgcgatccattacgtcataacgaagaacaccgcatatttgttggacgagtcgctggaggcgtatacgctacgatcacgggagctcgttgccgctactaacgctaatacctacggtatgtggccctcatccgcgttgtattccggcggtaagttctctacgtaccacgacccgccgtccggtggacaagcgtctggcgttgtcgggcgaaccaaagatgtaaagcgagcgtgtctgcgaggcggatgggggccagtgttgtcgatgacccaagcaaatagactcagcaggaagaaggttcgtgagagtagcaaccgaaaacaaaagtaatatgcagttttaagccacacaacaatgtgcagctagtgaatcgtgttcttgctccgaaaccgacgtcttctggtgtgctcctagtgagtcagcatgaccgttgtcacctccacgtaccgccgtcgcgaggcagcttgaccgttctcaaccccgtcatacgccgtgacttgtgggcaagtcggtactccgctgttcctggcgcaggaaggcggcaattggtctgaccgccactgatgctctctaatagcctcagtgagcactgaggatggcgccctcatcttcttccgtacccgcaactctaaccattcacctcagcagccttcatttgccccatcctctcctggcttgcggctttcaacttcttcacagtaccaatgtcggaaccgggtgccgtcgctaggtaggcaacactttgcttgatgcgatcgatccgggtcagttgcttcgccgccgtaaggtcaagccgcggcttcgcgacgatgcatcgttagcctgtgttgttgcgttggtggccgtgaggatcgaattctcagaactgagcagttgacgttataaaatctaacgtgtacagtattaacatacttgcccaaatagaagcacttcctaagcaatacggtacttaacgtttcccccctataatcgccaggacagcgtgttacagctgattcaatgtctaatattgcaaacttctaggccttcaatgtacaccatttaaactaaaatgccaaaaacttttactaaaagtttgatggaattatttgcctaaaagtgcagtagacttattttcctaaataatttgcattattattttcctaatgttttagcataaaacttttattaacaaaaatatcaaaaatgtatgcgagaccgcgttaagcaaatagatgctaagccaccatttgagacaatcgcgtttgaagttgcgctgaaatcaaatgttggagttaactggacattaaacttttgaaattgaaaatgacttgtataaatcgtaaaaacactttgatttgagacgtatggaaacagaactcaaaacctctgaaaaatctcaattttgcaaaacaatcagtttatatgcggggtgggtcactttagcaagttccaagccaaacccacatttttcatggggtggatccgtattggagacttaaaaacttccttgttgttgtaccgagaaaactctcgcgttaaacgttttgaatcggattcaaaatctaagaattgcaaaattatgggccttcacactaatactaacaatacaaaatctttactgaaagcttagtggaataattttccaaaatgttttgcataagtattttctaaaatttacaaacaaaaacattttcaaatatttttctcaaacattttgatgcaggaccgcgtcaaacagacacaggcaaaccataattggagatttttaaaataatgccatctaaagttgcacctaaatcaaatcttggagtttaccggacatccaacgtgtgagagtgaaagtcactcgtataaatcgtaaaaacacgttcggttacccggctcattatccttgccatgaaaaagcacgacgaaactaagacgccgcagctgttagtcacaagtgttcactataactatcgcccatatcttggggaaatactggcagctcttcctgccgctgctgtcggtgctcgcccgcttgtgtggggtttcctggccggaggagcagtctcacgatgacgcgtcagtacccttcgacaacgacgtcgaggacggtggctacggcggtacctacgtcgcgctggttgacgacgagagcagcctggccccgacacgaccgaccacggctgctgaggtgcttcatgcgcgtcctagcagccccaaggagcctgctcggggctctgatgtcgacgagtggacgagtaagaacgagctcgtcaacgcattggcaacgagtcagatctgaagctgcatcccaccgaacttggccgagctggacgaggcaacgcttgccaggactatggaccggaggcccgcgcgaagattcacttctacgccggcgctggccatcttccgcagcagcgacagatgttgcgacaaatgccggtgccttttgtcgcaggcggtcctttatggactgacgcagaccgagagacgcgcgatccattacgtcataacgaagaacaccgcatatttgttggacgagtcgctggaggcgtatacgctacgatcacgggagctcgttgccgctactaacgctaatacctacggtatgtggccctcatccgcgttgtattccggcggtaagttctctacgtaccacgacccgccgtccggtggacaagcgtctggcgttgtcgggcgaaccaaagatgtaaagcgagcgtgtctgcgaggcggatgggggccagtgttgtcgatgacccaagcaaatagactcagcaggaagaaggttcgtgagagtagcaaccgaaaacaaaagtaatatgcagttttaagccacacaacaatgtgcagctagtgaatcgtgttcttgctccgaaaccgacgtcttctggtgtgctcctagtgagtcagcatgaccgttgtcacctccacgtaccgccgtcgcgaggcagcttgaccgttctcaaccccgtcatacgccgtgacttgtgggcaagtcggtactctgctgttcccggcgcaggaaggcggcaattggtctgaccgccactgatgctctctaatagcctcagtgagcactgaggatggcgccctcatcttcttccgtacccgcaactctaaccattcacctcagcagccttcatttgccccatcctctcctggcttgcggctttcaacttcttcacagtaccaatgtcggaaccgggtgccgtcgctaggtaggcaacactttgcttgatgcgatcgatccgggtcagttgcttcgccgccgtaaggtcaagccgcggcttcgcgacgatgcatcgttagcctgtgttgttgcgttggtggccgcgaggatcgaattctcagaactgagcagttgacgttataaaatctaacgtgtacagtattaacatacttgcccaaatagaagcacttcctaagcaatacggtacttaacgtttcccccctataatcgccaggacagcgtgttacagctgattcaatgtctaatattgcaaacttctaggccttcaatgtacaccatttaaactaaaatgccaaaaacttttactaaaagtttgatggaattatttgcctaaaagtgcagtagacttattttcctaaataatttgcattattattttcctaatgttttagcataaaacttttattaacaaaaatatcaaaaatgtatgcgagaccgcgttaagcaaatagatgctaagccaccatttgagacaatcgcgtttgaagttgcgctgaaatcaaatgttggagttaactggacattaaacttttgaaattgaaaatgacttgtataaatcgtaaaaacacttggtttacgattgcgttatacacgaacttttcgacggtgtacaatatgtccaaattgaagtaaggtcatacgtctggataaagtccaattttgtgggtgtatgaaaatgatatatatatttagatggccatacaattcaaaattttagccatcaatttaaaagaaacacaaacagtggttaaaccctaagtgtcgcggtcctccgtcggggtcgtgtacttcggccgacaggtgaacagacgctgagcttgctggttaggacgatagatggtaggaagacttagcactctcacgaaaatgcaaaattgttgtcgagtggttagcaagcttgagaggcacttgagcggaagacggtgaaaggaaaagtgaattcaattgagagttatgcaaagctgcctagccgcctacctgcgcgcagccctggagttcgtcctgtgtcttaccttcgtgcagcttgatctctgagacgcctgacctctttgaagtagagtagatgaccctagacatgatgacgcggtgtccagtggtactgtcggctgatacttgtgccgcacttcacttaaagcgtagcacgctccgacactcccactcggcacaaaccaagcctcgtgacgaacaagttgaacttgtcttgaggcagcggcttggtgaacaagtctgcaaccatgaccgccgtcgcgcagtagctgatctgcacaatgtctttctgcacctgctctcgaacccagtggtaccgtagatcaacgtgccgcgaacgctgcgagacgcctttgccttccgccacatgctgagctgcttgattgtcctcgtggacaattgccttaccgacgtcaaaacccagctcgaaaagcagctgcttgagtccaatacactgcacgttcagctgcaggtgctcccaattcagctgcacggcaagagcaaggatagctcgaatggagtcgtgacggacgacggggctgaatgtctccgtgtagtccactccaaactgctgcgtgaaacccttcgccactagtctcgccttgtacttgtccagtgagccatctgccagtgtcttgcggcgaaaaacccatttggtttgtacaggtcgcacgttgcctgggcgagacactttttcgtatgtgccgttccgcctcggtgaccactgggcacccagaagcggtagcctccactcttttcgtacccaataaaggcgcctttagcagtcttggcgtccagcttctgtcgctgcgatttcggcaacagcacttcagcgtcggcgtgactcgtcagcacctcaattggcgttttgcccgcgagcactccggacgggtagcggtttcggatgtacgctgcagtcttgacagcgttgctccagaagcgcttgctcataccagctgcttgtagcatggagcgtgccatctcgacgacaactcggttgctgcgctcaactttgccattctgctgcgggctgtatggcgtgctgaactcttgtgcgatgatgttctcattgcagaattctgcaatctctccgccaatgtactccgcggcgttgtcactcttcagtacagcaacgagcgcctcaggaaccgccactttgagattagcgatgcactctcgtagagcgcggagttgagtggccaagctttgtctttcacagggaatactgcagccagatggtacggctcgatcatcatgctcaccatgcccgtgaagccgtctcgcgacgttgtctccattggccccacatagtcaatcgagatcagtacttggccacgttttaggtcgcgtggcttcttcgctggaaatggacgactggtcagcttcccagccgcacacccttcacacggtcgcagctgcgtggtggtcgtggctataccgccagccttcaacagcgccttgagatctcgcgcgtttaggtgtccgagcctggcgtgccagattgccaaatcgtccgatccaccaccagacgcgtagtcggcttcagcacagttgcccgcattgggcgtcgatacgacatacagcccactgctacggcgtgttgcaactagttttgcaccgccgctggagatcacacaccgcgcatggtcgaacgtggccgtgagcccggccgccccaaccttgcttaagctaacgaggttgcgctgcagtccaggtacatacagcacgctatccaacgtgcagaaccctccagtaatcagcggcaggtgagcctttccgctgtgagttgcggtcagagtcgtgccgctagcggtcgtaacaacgacgctactggtcatctcgtgcaggttcgataggagaccactggtgcccgtcatgtggctcgatgctccagagtcgatgatccagtcagcttcggccgcttgcgtggacacctggaacacaaagcccgcctcggcttcgtcgtcgctgtcctcgctagcagcggcattgccaaaggctcctccaaattgcttcttcgacttgcactcaatcttgaagtggccgcgcttcccacagttgtagcacttgcccttctttactcctcgtttcccgtgcgatgaggcagcgaacgcatttccgctgctgacagcttggctgcccccatgcttgctccgttgggcttgcgttgagcggcgtctagccccagcagccgccttgatgagaagctcctccatcgagccgcacgcttccaacgcaccaatgtagccgttccaatcgggaccgagactctgcaagaagttgttcttcttctctgcgtcggacagcgacaccttgtagcactccaactcgaccagcattaggcgagtcggccggatgtgctccagcatgtccccgccggcgtcgatggacaaggacatgtactgtcgcttgagagctccaacggtcgtatcacacacatgacggtgcgtcttctgcagcgcttgcagcatttcctgcgggtgcgtgagatcggcgaccaacgcggcttggtcgtccgtcagcgcggacaggatgatcgtcatggcgagcttccgctgaagctccagttgatgcagcggccgttctctctgctgtaacggacgatcagcttgtccggactcttcgtttgccagttgcagcgacgtcggtgcaggcttcagcacagcgccccacacgtccttcacttccagatacagctggagttggcgcgcccagacgcgatagcctgagccgtcgaacttgcgaagcttggtcgtgaaggcgatcgtggtattggaactcataacctgtcgagtggttagcaagcttgagaggcacttgagcggaagacggtgaaaggaaaagtgaattcaattgagagttatgcaaagctgcctagccgcctacctgcgcgcagccctggagttcgtcctgtgtcttaccttcgtgcagcttgatctctgagacgcctgacctctttgaaggagagtagatgaccctagacatgatgacgcggtgtccagtggtactgtcggctgatacttgtgccgcacttcgcttaaagcgtagcacgctccgacaattgtggttgcctttacggagaaaatccacgactgacctctctcttcttacttgaacgcggtcagcagctactccaccgacccgcttctcacctactgcaacctgcccttggggacgacacaccttcggcttccgagccaacgccgtactggtgtcccccgtcctcgacgtccagccgccgaacattccgtgccctccgctctacaccgcgccatctttcagcagcaaagtgggccctccgcttagacacgaaatgcttgcgcggcctggccttgctccgccgagcgtcgcgcctcctcctgcttcaacgcaccgtcgagcaccttgaggaaggttgtcagtcgaggtcccagacgtgacccgggacattaggttcggaagcagctatgcgtttgacgcggtcccagctctgcttttaacaaagtccatagggcaagtaccttatttggtatttttcgttaataaatgttgccatttgtgtgctatagtacacgctctaccttgcaactacttacgttcagacagtgctgttccggtgccacaccatctttacaccatgtgaccgaagcgggccaatagaaacgcgccggccgttctacgactgtggaacccgaccgaacggaacggcgggcagtcgatatctagcgtctggcgccgtggctgacgatggcggagcgcgtcgcggcagcggagtcgccgatgtcgaacgtgcagaagctcaagctgcagctgttccaccgactgcagcggcgccaccgtgacgcctggaagcgctactggggctccttccagctctacctggcggccaagctctcgctcgaggagttccacgcgctggccgaggaactcctggggcccgacaaacgtgcgtttgtgcgtgtgtccgttgctcttttaattcgcagctaattcttacctgtaacctctaattacttgtgcttctccagaccttcacaataagtttgtggtggtgctgctgagcacggcctacctggacgcggcggagctgcagaggagtccccagccaccctcagctccagagatacaggaccacaacggagaaggaggaggacaagctgcactggaggctgaagcaagccccacggggtcgaacgacccgctgctgcggattatcaaggaggagagcgcgagacatggtaagcgttgagtgtggcgtttgctgtgctgccgattgtttgcaattgtttaacgcactgggtggagattcggagcagcgctcgcgcgtgaagcaagaaccgcatgaagcgcacgggaagaagcggccacacagcagcgtcgcggctgctgacaataacgcggaggaggccggtgagtgccgaacacagtggccgtgtaatgtattgctttgttggtggcggtgggtaattgaaggattgcattgcgttttgaatgcggttgtagtggcaaataagctcatgcacctcgatcacgagcacccagatcaccactcggcgcaacttctcatggggctcggcaagtacgcgacttcgatcagcccttcgtcgattgcggtcacagcggaatcagcgccgtctagcagcaggaagttccagtcgagcgtatcttcagacggcaggcgagattagagggagcaagccgccatacacgactgtggcagagcctgcttggctacgcaatgcgaccaagcttggcacgtcgcagctattttatctctctttatgtattgcggtctctggctcctgcagcaatagcgcaggatactcaatagcagttcgaccagttaatcgtctggtaatgttcactttgcgttgcgggcagttcaagcagctgcttcgtctacatctgcctttcactatagtctctctaaagtacgaccccaaagaagagaatcgcttgaagggacaccaagcttatcagagctcctggagctgctcaagatctcgtctcgcgtgtcattctcgcagccgcacgatcgccgccaaccagccagccagctacagagtgagcgagtcaatgatgcaccagagccagcacccgacccagccgctgcccaccaccgtgcgctggatcccggacgccgaggtgagcgtgtgctacggctgccaactgctcttcgactgggtgcgccgcaagcaccactgccggtgcgttctcctgcctctgctgtgcatagtagcctactaggaacgggtactgattgctgctgctgatgctgatgctgcagctactgcggccacgtcttctgcgagctgtgcacgccgcagcgcagcctcatccgcgaggaccagatcctgaccaacccggagcgcaagtacctggccgtgaacgcgcacaacccacagcgcgtgtgcgacgactgccacgcgcgccttgagccacagcaggaggagctgcgtacgtagcgtttggagagtgatgcgtggaaggctgcagtgctgactctcgcgttgttcttgcctgaattctgctgtgtgaccaggcctgacgatgagcaacgccgtgcagcacacggaggtgaaggagtcgggcccgcagaggttcttcaacagcccatactccttcacgctgagggaggagatccgcaaggccacgtacagcgtcaagaacttcactttccaaggggttgtcaaggaccagtccatcccgctgccgctgctaacccacgccaggggcatcgcggtaactgaaccattgggaacttgtgccatggtgtctgtcctctagctaactgaacgttctacatgtgttctgcgatctgttgtgccagttcctgaccgtcatcaagatgggtttcgtgttcacggggcgcatggggacggggcttgtagttgcgaggctgccggacgggaggtggtcggcgccctcggctattggaactgctggcgtgggctggggaccgcagataggaggagagatcacggatttcgtgatcatcctcaacacgcagcgtgctgttgaggccttctgcgcgtctgggcaggtgaatctcggtgctgagttggggatctctgctggacctgtcggtcgtgttgcctctggagcgctggaggcgagcgcctccatggatgttgcgccttgctactcgtactcacactccaaggggctgtacgcgggcatctctcttgagggttctgtgatcctgtcgaggtcagatatcaaccgctccttctacggcaaagctgtgactgtggctgagctacttggaggtgtggagcccccaccagtggccgctgcaccgctgtacgatgctattcggtcggcgatggaaaggttagttcctgaggtttttgtttggggggatccattgaattctaacaccttgtgttgttccaataacagtccagcgaatggcgcaaaccgcgttgttcgcagttcgtcgaatccagcccagcaataccagcccaccgtaccagcagcggctgcgagtcccgctacacttcctgctccagtggctccgattcctattggctcgtccgcacctgcgggtagctctttgttcaccaatgctcccgtgaagctgtaagcgacgagcaatatgtgagggtcacaaggtagaccagatttgattttcacgacgtccatggaacgggttcacttggatggcgtcgtgttcgatgccaacacttgaattcagctttttaaattactcatggagtttgcagcgagcccgctccgatatgaaaacctagcgtgtcttgtgtacttctgtagtgctttcaacggcatctccaacttctgctgatcagttcatcgcggcctctagcgccgagaagaactgttcctgcatttgccgagcctcgcgggccttctgtaaattataacgcacaaagcagcacaatgtgttagtccatcgcgcccacgacgtacgaaagtctctttctcgtccgtatgtagtacctcagcctgttcatgctgcgccggtgtgagcgttgcagcactggccgcgccgttggcgttggcctgatcgcctccgttccctgcagcgcccgatccatcgacattctccatcttgacgtcctcatcggtccctgcaggcgacgctccgtcggcagccgccgcatcgtccgtcgactcgtgcagctctccgtgcacgcgctcgacagcgagtctggactcgtcgatagtgcggcggatgtcccgcgccgcgtcccgacgctcctgcacctgggtcttgagcatctggatcaccgtctccctcgcttggtgcggccggaaggcgttgatcaggttgtgcatgttcaggaagagcagctcgatgtcgtccagcttctcactgttcgcaacaaataaacaatgaaataaaatattaacataaaaacactaagaaatatactgctagtggggtctgcacgcacttgaacatggtcggcttcttgatgaggacgtccacgagctccacgaagttggcgagcagcgagcggttgatcctaattccacaagagtacggtactcgtgagtcttatttctcgcacctcactgtaccctctgcattgccgtccactgtacttcttcatctgggccttgtagtccacgacggcggcgtcgccctcgtcgccctcgggcgcgtacagcttcttgcctggctggggcagcaggtcgggcaccacgtcctgcgtgctgtagggcgacccgaacatgtggtacgtgggctccatgggctcgggcggcgccgggccgctctccacgccgtccgcatacagcgcgaagaacttgggcggcgccgggaactcggagacgatctccggcgcctcgggctcttcctgctgcggcgcgctcatgttggctgtaaggttagaaaagtacaagactgcttttcggccaataaacagctttaacgtctaaaatagccatatgggatcgagtttaaacgcattgttgcattgctgtaagtacatagtattcacatgtcaagctgtgtccttcagaggaggacaccactgcaataaccgcattggctcacctcagcaaactcgaatttaggggaacaggcgttgccctagtcttcttcaaccgttgatagacgtaaaggtttactgcaaaggcgccaccaccgcaaccgagtgtgaagtgcgcgcgaaagggtagccgaggtggtaggtgagccgctgcatgtcatccgacggcaaattgttgtcgctgtgcaacagcgtgtcagcgatggctccgtggccgcagttagaagtcaacgtgttggccgcaacgaacgggaggtcaattcatcttaattgcctgtttcttctctgcttgcagaatgtcgtccttcactcaagaggacctggctaattcgattgctgcccattcattttttgaaaacgcgacgcaacttcactttgtctttttcacgctcattttggctttcagcgcaaagatccaactgccatgaccctcctggctgtaatccatgttcttcgccagaacgatcatgtcagcgctgtagatggtatctcctccctcgtgccttctttcctgggaccgccaccgagcagttcgctagctgacgcgtcgagtcgatggcgctgttggacttgatctgggaagccagttgcacgacaaaagctggcaggaagcaaaagtggacactgacgaactacttgcgatccgaggctcactacagcagatgggaattcacaaacgcagtagtgactgtggtgcaaaagggaaacgtacagaagcttgagtggcttctcgctcacttcccaggttacgtgcaggaagactcggtggtggaggaggcagcgaaattcggtcacctaaacgtgttgcagttcttccatcgtcattgtaacgcggtaaacggacctacactcctggcaaatgacatagtggcggagaaggttacgtacgacgttgtggccagttggggggcggacacgctggtgctgggatcagaaaatggtcatcccgaagttgtgcagtggttggtagagcgcacgacgtcaattgatgaactaaccacgaccaagttgtttgcagacgcgggcaaacgtggagatattgcgttgctggagtggttggtggcaagaggtctcacgtatgacgagtgctttgtcgtgcgttcagcctccactgaagctctggagtggattgtcgctaaatgtaatcacagcagcttcttctcacgcagctctggccaggaagtaaataattttcttaatgatgcagctcgttcagctgcgcgcgttggtcgagtggatattctggaaagccttcactactgtgacgacaagctccagaagttgtattgttcggcacgaagcctgtagacacgaacaactggctgtggtcgagtgggagatctctcataaacaaagccacgagggggataggcgctttgaagtcacgctgtcgtggggcgttctggacgatgcagcctcgaatgggcacctgcagatagcaaaacacctttacgatcgttatgactgcaatctgccagtcaccatgttgctcgcggctgctaatgtgcacctacaagttgtcgaatggctgtacaacaagtttggcgaccagaggatgcttcactcgcgaaaagttggggacctggcggtgaactcggatattcttaacaacccatgaaaaacttggccagtgtagcatcggttcgacctgcaacagcgatggacgccgcagcgatgttcggccacctggagatcctacagtttctgcaaagtatccggcggctggaggaattacgcatgctggcggcgatttaaattccgatctgccgataataacccacaacgcgatgaatggagctgcagcatttgggtatttggaggtcgtaaagtggttatacggcaatgaacgtgcccgatgcacatgcctagcgctgatatctgccgcgagaaatcaacgctttgatatcgtggagtggcttattgaaaatcgaccgggcaacttcttgtctgatgtcatacaaaaatcccagagtattttgtcgctgtagtgcacacgtcgcgccttacatattcacctacctaacttttgcagatgaaataacatcgagttgagcaacccccatcctccatgtagttcttaatcgcaatggtaccggcatgcttcctctattctccaaccagctagagctgctatagtttgacaggttgacatttcgttgcgtactatgcacgcatagtacgcagattcggaagcagctggatgccactcgaagtgctctgggcagcaggacggccgacgtattgcgctgcatatcggcccactgatgcaactaaagtccgcgcttcagtggcggtacatggctcacgaatttcttccgacctcaaacgcccagcaccactgttgcgttcgtcgctgtggtttgaacctctgatccgatccgggctccaattgttgcgctttgcacctttacgtcggtgtcagtcttcttcctccaagctttcgctatccatacgccgccttttgacctcgagactcgcggccattccaacttccagatccatagtcatctaacaccattacactaaaaatgcaataccctttcatggtaccgtagtaaatgctcatcagcattactttaaactcatagcgccgacgccctgctgctgcacttctataaaaaattacattttatcgagcacatgttggtgcacttgagggcttggatctttggtcatgatgcctgccatggctgatgagaaatcccccaagatctcggggtcttcaccactgtgctagctatcatcgttgcactcattgcactcccatgggttcgtaggattgatcaacttcaagcttattttcgatttcttaataacttttcgagttttgggaaacgctatactcaacctttgtatggaacaatgtacagtatatctccaaacagaaaacggtcctgtattcggcgcatctctatcttgcaccctcgacattcgacgttcctggccgagtgtgtcaatgctgtctgtgctgcgctcgcgctcgcgggctgcggcctctcgctccgcgtgggtgcagcagcgtgcttcctactcgtccgcagccgccaagtcgtcgtcgtcgggcttattccgccgcgcgtgggactcgtacgcgtcgctgctggagacgcacccgctgcccacgaagatcgtgacgggcggggccatcgcggggctcggcgacgttggctgccagctcgtgctagaggcgggcgaccaccaagacgaggagaagcccttgctggacgtcaagcgcaccgccatcttcaccttcctgggcggcgtcctcatcacgcccgtgctgcacgtgtggtacggcttcctggggtcgcgcctgcccggcgtctccactgcggcggtcgccaagcgcctggcgctagaccaattgggcttcgcgccgacgttcctgcccgtgttcctgtcctccgtcttgacgctggagggcaacgccgagcagattccggacaagctgcgcgcggactggtggcccgtcacgaaagccaattggggcgtctgggtgcccgcccagatcctcaacttccgcttcgtgccggggtcgatgcaggtgctcttctccaatgtggtggggctgctctggaacgcctacctgtcctacgtcagccacgcggaggtgcccaaggctctccctgaggaggcgcacaaggccgagcactaaacagttttgacccagtgctttgggggctcgaaggcttatcaccagcaagttatgagcttggtggaggaatattaagtagacttccgacggtctaacgtactcctacctgtctgctgtgtcagttttaggctctatctgtgtctacagtgcagtttggtcagtgctgcgggcttccgaaggtattgtgcaagggtgaggcgaggtgcttcctggctgattgcaccgtcttggccacaaatgatgccaagccgggcggtgcgattcggtcacggaagctgcgaccttgtgcgtggtcttggtcgttctgggagacgttggacgctgaagagaagtaggacgttgctggggacagccagatcgtcgcgttcgcgcactcgggcggctcactcacggcattcggcagctccatcaagttgttgaagagatcggacccgcgtcgactggtttcctccctcgtcgaccggacaggacggatcgtcgtgcgcttcttctgtccctttcgcttggccatcgtgtcgctggtgctgttattgccaagcggcacgacgtcgtagtcggcactgcgctcggacgtggccagtcgcagctcgaacttctcgacctgctcctccagcgttgtcttgtcgactgaaagcgtcttgagctcgaactccatctgcacgagatcggcacgaagactggcgatcacttcgtcctgcgcttgtagttgccgtgcctcgtaacttgcagcacccgtgactgtggcgtccagtgcggcctgcagtgtgtcacgctcattttgaagatgcagcacctgcgcgtgcgccgctgatagctcttcttccagcctacggcagtgcatttgagccttatccagtgccttcctggcctcagctcgatcccgacctgcacagctgacagcagcttgaagcaattcggtctgcttttgctgctgtgccagagcgcgcagcaattcgtcgtgtgcttcgcgcatgtcgttggtctgttgttcgtcttcagcacgctgcgccgctaggtgcgcactctgtctgtagagcgcatctctctcaacgcgcagtccactcagctcgcgttccagagcggcattcttctgtatcagggcaagttgctcactctccgcctccttacgctcttgctcgcgagttcgctcctgggtctctaggtgcgctgccagcacctcgacgtcttcctgcagttggttgcaacgctggacgagagcctcgtggctctcatcctggacaacttgcgtttcgtgctcactctcgtcgcgctcacggtcactgtcgtccacgctgagggcggagggctcgagctcaggagaagtggacgctgctgcagcgtcgcggacttttctgcccagctttttgcttgcgatggaggcgttgaggtcatcggcgtgtccgttctgctggtttgacgtgtgaagctccagtggtcggtggtgcgcccagattcgggtggatgtagagggctccatccttgtatgctgctgctgctacaaaggtttggtggaagtgaatggagcgcagggagcacttcaactgcagcgactgtcgatcactaagatggctacacgaaaatagaacgcaaaaaatagaacgcatttcggtggttggcccattttgatgagcatcgggctgcaacagctcggcaactcacattgccatgcagtcgcaccacttcacgagccatgacttggacgtacgctacagctttgcaatgtattgccaatcgtcattctccacacaaacgcccactttcctttcttgtacatgtgctgcgtagctgctcgagtcgtacgtccatgactgcatccagcaactgccgaagctcccggccgcgacggatgccgcagtggcgggggccagcatccagatccccacgtgctgctcgtcataccacaccgtgtgtaccaatatgctcaaggagatcgtgacgctgctctcgctcttctccccgcggctgtgtcggcttatcggccaggtctgggatctcgcgtctctcaacgtgttcgtgctgctacaagtggcgaacacagctctgcaggacgcccaacagttgcgcgagcagctagtcttcatcgagcgcttccacgcggaaggtctggagcgacaagcctcgctcacccagcgatacgaagacgagattgctcgccagcgcgtgagtgagcaggggctgcgcgctgaactgcaaaaggtgcggcagcgcgcgaaccacctcgcagtggaaaacggtcagctccacctcatcgtgggtcgagtcctcgacgcccaacaaaccatggaggctgctcgctttgacagctccaatcctgcggagcaactggcgtcgctggagtctgacggtcagcgcttctgcgaagacgtcgcggcagttggagatgccgaagagcgtgagctcttcggagttggtgatggagctgaagacgcactgtcgcggattcagactgtgcaccccatcgagagctgcgcgaccgactttgaacagctctttcaggcgctcttcgagggcgaggagcgcaacgtgcgcgtgctcaacgagatggaccgcttcatcaactccactgctgtcgcgctgctctggcggtacggatccacggaggaggaacaccaaatgatgcacagaatgctgagtgcgagcaccgtcggcacacagaccgacgggactgtgaccgagaagccttcgcatctcagcgctcgaagcggcgatcactgggaatccgacagcgacgacttcgggtcggacgacgacaatacaagcgcgcgcgtagtcgctaagaagagtcaacaagagctcgaggatgaagacaaccagcaatacaagaagccggcgaagcacgaggtgattgcagtcaccaagcaccaggtcatcccaccaaccctgcgcgcgcagttggactcgcgccctcgcgtcaatcgcgtcctcgaccaatgccaactcaaccgaatcctgctgcgactatacctcgaaaaactcgagtgcgacgcgcgcacgttaaggcgtcggcgattagtcagcgctcgtgctaggaccgacagcaggaccccggacacaagcgcaaaacccatcgcagtagtccgcacgccactccaccgcttcatgaaggagttcttcgtcactcgctacgaagtgccggcgctggctgatttccacatgatggaggtcgtcaagagctgcctctactatcacgagcggctcaagatcgcgcttcgcaaaggcgcagtcttcgcgtctgctgcgttggtcgggtgtctcccaggaatgcccgagaacctcatccagcacatgcagcaccacaatcaacaccaccagcatggcgaagcagcgatacatgatcatccactccaggaacttttccagcaacagcagcagtttgtcgccgccgacgtccgcgtagcactctttagtcaactatgtgagcttgtgccgttcgacacacgcggcacagtggtggatgcagcagcaataggcgggaatctcgccgcctgcttgttgaatgccgtggtggacgtactcggcgacgcgctggagctggatccagccgtacggtcgatcgctgaagttgaggaagtcccgaatgaggcgagctgggggttcccacgcccgcttgcacttgagctcttgacgcgacaccttcaatttgttgaccagccgattatcgaggacactaaagctcggatcatgcggttggcgcctctgttgcggtcgacttcagttgaagacgccatcgcagccgactacatctcggttgatgtcttcctggcgctctttgcaaccacgtggatgaaatacgaccaatgtctggaaaacaagttgcgcgagagcttccgccatcaattgctgctgtcctcccccttcgccaggaaacaattggatgctcggttggcacggaccagcgtggctgtggaaggtgaaggagacacctcacagcgagacagtgaaggcccaacaggccgaccggctagtcgggtgagcacctggcgcgcgaccacggtgttgccaaccgtgtccgtaggagcgacagcgatcgcagtgcactcgacacctctggagctgctcactcaggcttggatgacgcttgagaacgagacgctgtcttcacttgacgtcgaggagcttgagagcacgttccgcgggctgctggaagccaagcgacttgacggaaaacatcaccgccggcagtcgttgaagaggctgcctaaggacacccaagacgctcctgtaggagctggagtctccctcggtggcgtgactgagaaagagttcgtgttccacgcgctccaagttcttcgacggcgacgcaacaacttcggactgcgcacgaacagcagacgcccacctcgctttgccgtttacggtagccctgttcacgaagacatcggatcagtaaaaacggacgagatatcaattcctctcgagtccttgaagcctggactcaccaccgagagccttgcctacgttggcaagtagctgctgcaagacacgactcgtaaaaagcaatggaaacaatgaaacaaaactgagatcattcacttcggctgcatctccatccatcgcatccactggcagacacgggttaacagtaattctgcagcacttgctgcatcctcctcctcggaattggcggacgctccctgcttttttgcatctctttttcttctgctctcggctcgccttctccgtcgtctcctacggcacttatgtgtagaacatgcggttcatgacgttgctgtgaacctcagcgaactcgaagttggacgcgttcgagttgtacgaacttaccgtggacgcgccatccgagccatcgttcaggaagaagcgcgcacgcgcggccgccaagtgcgcgtagtacacgggcgtcacgaaagacaccgagcgcgtgcaacgcgagaacgtatagcccaggtggtatgttagacgctggatgtcctcggcggacatcttgttctcatcgtgcagcaccgtgtagtgcgcaggcacagtggtgccctgaatgccgctgtggccgtacaggaagaagtcgaagcgatgcggattcaccacacccgtgtcgataacggtgccaggcatcacgttgcccttgcggtcggcgtcacgggagttcaccgcgaaggctcgcaagtggtggcgcttattcaccaccacgaacgtcacgggcgggttgtagtcctccgagatcatcttgaatgccttgcggagcgctcgcatctccatctgcaggatgtcgtgcatttgcccctcgctcacaccatcgcggtagtagatcacgtgctccggtttgcgctgggtgttttcatagtaggcgaggaacagctcgcgcagcatgttcggtagttgctggatgtcgctggaggccttctgcgccgccacgcgcgtggcgtactgagccgaatagcggtccatggaggctacaaccgcggcaatggacggccgaccgcccatacccgagcgcgggtgctccacgtcggcaccgatgatgatcgtaggcgcggtgctgatcagcgggagctcatcacgcagcacagcgttcttgccctttagcttcatgttgatcttcaggcacacgttagcacagaactgcgggttggcacgcggtaggttcacggaggcaatgcactggctgggtaggccaaggaccgtgtccgacatgcgcttcacgtcgccatacacgggcgagttcttggccggcaagatcacaagcagaaactgcggcgggccagcgttccggcgctcgagctcctggtgacacatcttcatgagttcttcgacctgggcgccacggtgttggtcttggtggatcagcacggggttcttgtcttcgaacgggagcccgcgctggtctcccagatccgtcagtttcccaatgaagttgtggacctcacgctcattcgcgttagcagcgacgatcacgccccaattgcgtacaggaacaccttccacaaatctcttgctgttgaggctccactggccgccggccggacgctccgatacattctggtattggacatcaggagcatcaattacgtgcgcctcggtcgactcgaggcgctggtccaccttgataccgaaggcagcgaggaacgggtcattctcgaacccagcctggcgaacttgctccatgatgttctcttggcggttgcgtgggggttgactggtttggcgaatgatctccgccgtgtccaagtcgttgatgttagcgcagcgctgtccaggagcgacctcgcacacctcaatcggcagccagttttccttaccgggtcgcttgctgccaacgttaaccagcggcaggttggggtagcgcagctgcatgttgtacttgccactgaagtacgcggccacggacatggtctctcccttgatgttcaccatcgtgaggttggcaggctgggcgctgacgccgaaaatcgcgcgcttgcgatccttgcggtgcgtcgggactacctcaatcttgcgcagtgcgcgcgccagcgacttcatgtcgcgctccgacaagtcacgaacctcgtcagggccgcgcgcacgcagtgctgccatggcgagctgcatcaagggacccggcgagtagaataccgtcgctgcctggtcgacgttcatgaggagcttgtggtcggcaaggcggatggcttggtggtagccccagcacagttccttgccgcccttcagcgtgtgcgtcttcttcatcgtgaagaagttgcgtccgacagcaatcaaacgctgcgcacccaagtgacgagccaccacgtcaagcgcctgaagaacgggcatgacgttcgtatccgggttcgcgtagtagtccgtcaagcttgacgtcgagatcgtctccaccagcttcatcttcgccacgaacgtgcgtgggcctctgaacggccggcgagcggcgccatcgccaccagcaggtggttgctggggaggagcgggcgcaccgttaccgtcgggatcgatgtcagggaaatccttcgcgttccaaggcagcatggtcggcgcgtaaagcgcagccataccatcgtgaaccacccgaatgccggcaaactctgcttcatactgacgaagcgcagcgttgatcacgtttcgcaccagcgagcgcggaagagggcgttccggacgtgcctctcgttttggcggtgcatctgcggactgctcggccatctccacgtccttgacgtccttgccctcctgcttgatctcttcacccatgctctcatccttctggtccgcgcctgacggaccgtacttggagtcggcctggagatcgggcgagcgctccacgtgcacgtggtacttgaatatctccgggggcgccgagtcgagcgaaataccgaagtagttgacgtttagttgcgtcgtcttgccacgctgcgtgacgcccgggcggcgacagaactgcacttcctgctgcagatcggcgtcgtccgcgcggacttcacgaacgccggcgcgaccggtccactcgtcctggatgcgcgggtcggcgatcggctgtccgatctgctcgtagccagacccggagatagcgccggcgccgggaccctcttggccacgcgagccaccgccaccgccgccgcctcgtcctcccccgcgccctcttcctccaaatccacctcggtctcggtcgcggtcaccgccgcctccatatccacgatcgtctcggcgatctccacctccgtagccacgatcgcggtctcccccacgacggtctcctccacggtcgtctcggcctccattgccgccgcctccatacccacgatcatctcggcctcctcgatcaccgccgccaccatatcctcgatcgtcgcgcccgccgctagctgcgccgtatccacggtcgtctctgtggctcccatagccacggtctccataactccctcctgcaccaccaccagcagcgccataaccacggtcgccgccgcctccagctccatagccccgatcgtctttctgaccgcctccacctccatagctgcatcggtcgtctcgcgcgccgtatcctccgcgcgagcgatcttcataaccgccgccatatccacgagaccggtcatcgtagctgcccccgcttgcgccataacttccactgctgcccccgccgtatccactgcgactttgatcgtaccccccggaagatccaccataccctcctctgctgtcgtatcccgaaaatgctccttcgccgtaccctccagacgagtggccgtaccctcctccactgtcgtaagatcctcctctactgcggtcgtcgtagttgccgctgcctcctcctccgtaggccccggacgaatggccgtagtcatcgccgtacccgtggccaccgccgtagctccctccactgctgccgcctcctccgcggctgtagtcgtcgtagcccgacgagcgcgagctgtagtcgcccccgccgcgctggtcgtagcccccgcgcgagtcgtaacctccgcgttgatcgtacccctgctggccacgctggtcgtaactctggtgctgctggccgcgctggtcgtaaccttgctgctgctggccgcggccttggtcgtatccttgctgctgctggccataaccgccgcgttgatcgccgtagctgcctccgccgccgctgcccggacggtcgtcgtagccgcggcggtggtcgtagccacgctggtcgccgtagccaccgcctccgccgctgtagctcatgctcgtgctggtgtctgcctcgcttcagtccttcacttgagccgcgtctgggatgccacgcttgtaacggctggaagacagatttacactgcgtttcagtaaggtagatactgactaggcactaaagcggaggattaagcggctcacttcaacttgatcccttccatgaggccagtccctccctttcccttccctgacgttgaggcaatatattgatgcagattgagggacgaggctgagcgacagatgggagatggcggaggtgcttggctcaacggcactctgtggccaacggaatcgaggctccgactttaatgcaccaagatgcattggcaatgagcaccacagcagcatcgcctcccttgcaatcctgccagaagatcgagatcgagacgtagtggagtcactccatctaaactgcagcttattcttcacgcaatgactcgctacactaaatgcaaaagcttttccttggcgacgacctcaccccctcactcagtggccgccaccgaccgacgcaatcaatctacacgtagaacatgcagtcgagcatgttcttgtgcagaccggcgaagtcgaagctggacgagctggacatgttggtgctcatggacgccgtgtccgacgatccctcgtacaggaaaaagcgcgcgcggcccgcggccaggtgcgcgtagtacgccggggtcgcgaacgacacggagcgcgtgcagcgcgagaacgtatagcccaagtaatacgtgagtcgctgcaggtcgtcggccgacagtcggttctcgtcgtgcagcaccgtgtagtggcacgggacgctcgtgccttgaattccgctgtggccgtacaagaagaagtcgaagcggtgcgggctcaccacgcccgtgtccagcaccgtgcccggcaccacgttgcccttcttgtcggcatcactctggttcacggggaagacgcgcatgtggtggcgcttgttcaccaccacgaaagtcacgggcgggttgtagtcatccgacagcatcttaaacgtcttgcgcagcgcgcgcatctccgactgtagaatgtcgtagaaccgtccttcgctcacgccgtctcggtagtagatcacccgctcgggacggcgatcggtgctgcggtagaacgacaaaaagaggtcgcgcagcatgtgcggcagctgctggatgtcgttcgctgccttctgcgccgccacgcgcccaatgtacttggccgagtacgcgtccatggaggccacaacggaggcgatcgacgggcgagagcccatacccgagcgcgggtgctccacgtcggcgccgatcacgatcgttggacaggaactcacgagcggcagcggctctcgcagcaccgagttcttgccgctcagtttcatgttcatcttgaggcagacgttggcgcaaagctgcgggttggctcgacgtagattcgtcgcaacgatgcactgactcgggatccccagcaccgtgtcggaggtgcgcttgatccggccgtaggagacggagcctttgtcctgtttgatgaccattatcaattgaggcggcccgttgccctggcattccagttgtcggtagcaggccttcatgaggtcctccacttctccacgctggccgccacagcgatcgatcacgagcgggttccggcactccatcattagtccgcacttgcacgcagtgtcgaccatcgtcccaatgaagttcttcacctcccgctcgtttgtattggcgtcgaccacaacgccccagttccgcagtacggctcccgtcacgaacttcttgtccttcaaattccactggccacccgacggtctctcggacacgttggcgtactgcacgtcaggagggtcaagcacgcgcacgtccgtcctctccagttgttggcccaccttcatcccgaacgcagccaggtacggatcgttctcgaagcctgcctggtggacttggctcaggatgttctcgcgacgagcgtgcggaggttgactggtctggcggatgatctcggccgtgtccagatcgttgatgttcggacagtgctggcccggcgcgacatcgcacagctcaatcggcagccagttctctcggccagccttcttgctgcctacgttcacgagcggcaggctcgggtgctgcagccgcaggttgtacttgcgcgagaagtactcggccacactcatcgtctcgcccttgatatccaccatagtgcggtcagcgcggtccggactaacgccgaagatggcgcgcttgcggtctttgcggtgcttcggcatgacttccaccttacgcagagcgcgcgcgaggttcttcatatctcgctccgttagatcgcggaccgccattggcgagcgcacattaagagccgacatcgccagcttcatgagctcgcagggctcgtagaagaccgtggccgcctggtcgacattcatgagcagcttcttctcggacacgcggatggcttggtggtagccccagcaaagttccttgccgcccttgagctcgtgcgtcttcttcataccgaagaagttgcggccgacagcaatcaaacgctgcgcacccaagtgacgagccacaacatcaagcgcctgaagaacgggcatgacgttcgtgtccgggttcgcgtagtgcacctccaaacttcccacggcgatagtttctgccaacttcatcttgacgacgaacgtgcgcggtcctctacgacgtcggccgtctcgggtctgttgatcctcgccggtgggggcgtcagggttcacattgggaaagacgcgtgagttccactcgagcttcgtcggcgagtagagcgccgacatgccgtcgtgcaccacgcggaccccaccgaattccgcctcgtactggcgtagcgctgcgttgatcacattgcggatgagtccgcgaggcagtggccgctggatgcgaggcggttccgtctccagtttcttctcttcgtggcgctccatgctttcgtcttcaggtgtgtgcgccacgtcgacatggtacttgaaaatctccggcggggcggcgtccagggagatgccgaagtagttcacgttcatattcatcgtcttgccttccgtgccgaatcccggacggcggcagatccgcgtctccatctgcagccccgggtcttccgggttgacgtcaatcggaggagctcggccagtccattgatcttgcagccgcgggtccatgatcgagtccccgatcttctcgtagccgcagccttgaatttcaccgatacctggtccacgctcaacccgtcctcgaactcctccacctccaaagccaccgcctcctcctccaccgtatcgactgcctccacgattatctcgaccattgccacggttgtcttggttggcattcccaccatagccacgactgtcacgcgtcttggattcatcattgtatcctcctcgactgtcacggttcccaccgtagtttctgctatcgcgagagctcgagtcccagttccttccgtagcttcgattgtcgccggaatttgagtcgccgctcctgttgtcccgaccctcgaagcctccgcgagagtctccaccgtagcctcgagtgctgtcttgtcctcgagagctgtcgtagttccaatcattgttttcgcgtttgtaggcacctcctgcatcgtgcccgtacccacgctcaccgtggctgctttgacttccacgcgagtagtcatcaccgtggcgctcgccgccgtgctgctgctgcgagcgggtatcaaactgattgctgcttcggctgccaccgctgccatatctcccagcagagctgccatacgaggaagagtagtcgtagcttccggagcgaaagcccccaccgtagtctctgctcccggaggcttgattgttgtagcccccgctataaccatgagatgatctttcaccgcggccttcgccatagctgcgggagctctcgacgcgtccaccgccgccatatccaccgctgcggctttgactgtagttgctggacgaagaggaagcactgcgatcatcgtaattgtagcgtccgccgtaggcgtcaccctgactacgataattgtagcctcctcctccacttccgtagctgccagccccggatccatagctgccgccgcgactggagtcacagtcacgtgagcttgagcttgacgtggagtcgcccccgaagcttcctctgcggttgtagtcgtcataccccgacgagcgggagctgttgtagcccccatcaccgccatttcctcgcgactcgtacccgtagcccatcgcagtgctcggcgttttcagaaatgatcaatgccggagctgagcgaacccgcatttcgtcgcctgggagaggacagggacctaactgcctgaaagcaatgctgcaggagtgctgcaggctcggtgatctccgagtgaattgcttcggcaaaacaaacttcaactgggacgtgccgataccagcacggattgactgtcatcgaagccttcgttactggtgagtcccagaggtaagcgttgctccatcgaaaggcaaacgctaacggcaagacctcgcagcttttggttcatccggcagcaaggccagcaaaaataccaccgctttgctttcactgcgaagtcctcactcactgcatggatagatgcatgtcttaagcaagtaaatgctgcagaatccgtaatgcgcaataaggacaccaatgccaacttcattaagagaccaagctcaaccccgaaataatgaatccccttttcacttgtgcattcctgcatccactacccacccgctatacgaaaaacatgccatttctgacaccgtcatgaggatcagtgaactcgtccttcgtatagtacaagccgtcaggtacctctctcctgcagcagcgcgctcggcgggccgctaagcgcgcgaagtatactggcgcaacaaatgacgtggaccgagtgctacgaccgagcatgaatccaaggtgaaacgtgaggcggtgcacgtcttcaactgacaaagcgttctcgtcatgcaggagtgtagtgacaggggatgctagtagttccgtggccgctgttgtggccatacaagtagaagtcaaatccatgtgcatccacaattcccgtgtcaatgattgtttcaggctccacgtcattctcgcaattgccgtcgctcgagttagtcgggaaagcgtgcacatggtgacgcttattgactgctatgaacgtaatgagaggcgggcagtccgccaacagcattctgaatgccttgcgcaaagcattcatttctgtctgcaagacgccaaaatgctgatcttggctcgctcctccccggtagtagacaacattctccggtatctgacccgtgatctggtgccacgtcacaagcagctcgtactgcacgcgggtcaacagcttcatgtcaccaagtgtcttctgctcggccacacgcgctacatacttcgctgagctacagtccagcgaagcaacaaacgaagcggttgacggtctcccccagttgccgttatgctccacacttgcgccgatcaccagtgttgcagctgaattggggaatggcaacaggcctcgaactacagcattcttcccatccagtttcattttaattttgaggcaaagactcgcatagtaatgcggttttgccgtgacgattttctgcgagagaatacattgactcgggactcccaagaccgtatcggacatttgcttgattctggcgtaggagttagcgcatttatccggcttgatgaccatgatgagctgtggcgggcccttgttacacatttccagctcctcgaagcacattttcatgagtttttcgacgtccactccacgatacccgtccgaccgaaccatgcaggggtcactatcctcgaaggacaacccgcactcctcccccatcttcaccaagttggaaacaaaacttctcacttcgccctcaccaatgctgctgaacactacaacaccccagttgcgaagtactgcgccctccacaaatttcttgcctcgtacatttcactgaccgtccaatggactggttgacacattcgcatactgcacttctgggggaggaatgacgtgggcgttcactatcacaagacgttgctcaatctttagtccaaaggcgtcctggtacggattatcgtcaaagctgatacgacgaacccggccaattaccgtctccaaaggaatgttggaaaactcgcgcgcctgcttcgtgactttaggatcgtcgagttcgcttttgcgctgtccaggggccactttacacaactcaatcggaagccaattctcccttccaggtcgtttgcttcccacgtttaccagcggaaggttggggtgttgcagctgaatgttgtgcctccaactgaagtactcggccactgacattgttttgcccccaaaatgtactaatccatcacaagtcgacgtcgagctgaggcgtaaatgcggtggctaatgcctgtgcgatgtgtgaaggtcacttcgatcctgcgtagagctcgggctagttttctttgctccccataggtcaagactgagatctcggaaggtgaacgcgcgcccaaagtggcagtcaccagctccgtcaggtttcccggtgtgtaaaagctcagcgttgtcttgtccagcttcagcaggagtttgtggtcggccacccggacggcttggtggtatcccctgcgcagttccgctccgccatgtaggggcaccagctcttcgccatcaatcgagaaaaacttgcgctccacagagaccaagcgctggcgagcgaagcagcgcagaatcacaccgagagcttgcaacgcgagcctggaattcacgtccggggtttggagtagtaatctctcagcgacttgactgcgatcacgtcggctagcttcatcttcaccacgaatgtacctgtggtggatagggggctttgcacagagtctggagcattttccactgaatctggatccacattttcaaacgtcttggtctgtgcagcccacggcagtagcacaggtgaatacatcagggatccaccgtcgtgcaccacccgagtgcctccaaactctgttgcgtactgccggattgcagcgtcgatcagcggcgcatcagaccgcgcgcgtattgccaccgcccgtctgagcgcgagatgtccacatgatagagaaaaatctctgatgggttgagtccaccgacaactccatgcaattcacctgcagcttcacagttttgccgccagtggcaactcccggtcgacggcagatgagaaattcctccaagatagtgtcgagatcttcagcattctgctccgactccacctcagcagtatccagccctccagtcatcgctgcagctggctccacgcgttcgtcggtccttccgtagctaggagagccatcctgagctggcattagtatctgagtggggctacagctccacatacactccaccacctgtccgtagtccgcacagctcatttgatcgattgactatcttcaccgttatttttcggaatcgaaacgagcaaaaaatttcaatttgggggtaatcaaaacatttttgattggtagaactgtcctcctcaagaggacacaagtgcatcagccactccacctagatgtaaaacatggcgtttttcacgttgccgtgcacctcagcaagctcgaattggggtgaatttgcgctgtccgaggcgtctccttcaaccgccgagccttccttcaagaacaagcgcgccaaacgcgcgtactgcaaaggcgccacgaccgcaaccgagtgtgaactgcgcgaaacagtgtagccgaggtggtaggcgagtcgcgtgatgtcatccgccgacagattgttctcgtcgtgcagcactgtgtagtgacacgggactttcgtgccgagagggatgactccgtggccgtagaggtagaagtcaaagcggtgcgggtcaaccacgcccgcgtcaatcacagtgccaggcactgcgttccccatgtggtcggcgtcccgagactccactggaaacgcgcgaaggtggtgccgtttgttggccacgacgaacgtcacgggagggcggtagtgctccgagatcatcttgaacgccttgacaagtgctcgcatctccgcctgcaggacgtcgaactgctgcccttcgctcacaccattgcggtagtagagcacgcgctccggcttgcacttcgtgcgcgcgtagtacgcaagcacgcatattcggaagctggtggatgtcactcgaagtgctctgggcagcaacacgagcggcgaagtgcgctgggtattggtccactgatgcaactacagcagcaatagatggtcgagacccaacgcccgagcgcgcgtactcaacatccgcaccgatgatgatagttggagctgactggatcaacggtacaggctgttgcagtgtccagttggtccctccgagcttcatgtacaggacgacgacgtagccctgcgcgcgttcgatgccaagatgcactgactggggacgccaagcacggtgtcagacacccgcttgatagtatcgtagagaccgtcagttctcgcttccttgaccaccacaataagctgcggctcgcctttatcgcgctcttccagcgtgctgaagcacattcgcatgagatcttcagcttgagttccagcgtaatgatctgcgcgaacgatacaaggctggtcgtcttcaacagtcagccccatcttacgtgcagcgtctatcaatttgctaacaaactcgtgaactttttcctcactcatgttggcagtgacaacaatcccccatttgtgaagaactgcccaatccactatccgcttaccccgtaaagaccatgaaccgcccgtagattttccaacagaagtttcaaactgcaattcaggtggctcaatgactcgggcgttcaccatctcggtctcaagactcactttcatcccaaaggcggtcagatacggatcatcctcgaaccccaacgcgtgagcatactcgtcaatggctttatgtcgggcatttggaggctggctggctcggaggatgatcccggcttcgtccattctgcttatgtcacggcagcgctgtccagatgcgagttcgcacaactcaatgggcagccaaatctccttccccgttcgctcactgcccacgttgacgcacggtagctatgggaacctcagcttcgttctgtagcgcttgttgagatattcagcaaccgacatggtatcacccttgattgaaaccatgagctggccagcaccaagttcgctcacaccaacaatggcgcgctttcggtcgttccggtgggtggggatcacctccaccttgtgaactgcagttgccaggatttctttctcctgggccgacatatcgtgaatattagcagccgatgtcacgtttaacacggccagaacgggaaccatcagtgcgttcggctcgtagaatactttagatacgcagtcgatggtcatgagcagcttttggtctgcagtggtggaatcctgagcacaattgcttcccgccatacagcgggaacgccgtctttagggagaagaaggaccgcccgactgcagtccaccgctcggcagccacataccgcatcaccacgtccaaggcttgaaccactggctgcacattcacgctcgcgttcgaggcgtagttcatctcgataatgtccgccagcttgatattcaccacaaaagtgttcctttgacaagtttgatcgcttgaatcagtggcggccgacgaaattgtgttatctatgctgatctcgtcaaactttttactgttgccttcccacggcaacatgactggggaatagaccgcagtcttgccgtcatgaacgacacggacaccagcaaattctgcttcatgttgacgaaatgcggccttgatcacgctgcgcaaaagcgaacgaggcagcggacgctccccctgcggctggtcagaactcgttgccgttccttctccttcgatagctgcgcgctcgacgctcagatgatacttgaaaatctccgacggtgctgcagtgagcgacactgcaaagcggttgaccttcagccgcacgcccttggcagcagtagcgacaccgctcggacgacgacagataggaaacgccatgacaagatctggatcgtcagcgctcacttcgcgcactcctgcgcggccactccactcttccacgaggcgtggatctaccaccgtcttcttcctccaaacgttcgctatcccgacaccgcttgtgacctcgagactcgcggttgttctcactgcggcattcacgattgcggcgacttgagcgatggtcttcccagcttccatctctttcgtacgtgtagtggtcacgaaagctgtctgcatcgcgtgaacgctcgtactccgagccatatcgtccgaatctacttaacaaaacaccaagacgttagcacgaacgacataatctaccatcttacatcggttgggcatcgaactcggtgttgtagccgcttcgatggcttgcatagaggtcagcgctgccgtagctgttgtatccggagccataccgactcatctctcgccggccaggagtcgtccggtaattgctgccccgatgtgctctggagctgctgcgatcgcgcccatgcggagagtacgagcgacccatgctttggcaaagcgaaatgaggtgaggagacaactaactacctaactgccttgcatacagcaactcgtacagcaactcgtactgactgggacgcgccgcagcgacaaggtcctcattatactgcaaggccagcaacagctctccgtcagcacaaaccgagtgcaccactacgcgttaaacaaatgcagcaaaagaaaactcaaactcaatgccatgttcatcactgttcaaactcatcgagacgacgctcatcatactgcactctgcgattcttcttcgtcctagattgcacactcaacgctcagcatcaccgtgcgctcaaatgaaaaacattttgttcagcacattcttgtgcacctttgcgaacaggaacttggccccactcgagctgcccgcaatctcggacgcctcctcctgcggggcttccttcaaaaagtgacgcgcgcgcgccgccgcctcattcgcgtagtaaacgggagcagcgaccgacaccgcgtgggtggagcgcgagaacgtgtacccgagatggtacgtcagcagttgaatatcgtcggccgacaggttgttctcgtcgtacagcactgtgtagtggcacggcttgctcgtcccctggaggctgctgtggccgtagaggaagaagtcgaatcggtgcgggtccagcacaccagagtcgaccaccgttcccggcttcacgttgcccttgtggtcggcatcacggcgatccacggggaaggcgcgcgtgtggtggcgcttgttggccacgatgaacgtgatcggcgggctgtagttgtccgagatcatcttgaacgccttgcgcagagcgcggatctcggccttcaggatgtcagagtactggccgtcgcccacaccatctcggtagtacaccacgtgctccggtttgcgcttggtgcgctcgtagtacgcgtgaaataactcgcgcagcatgttgggcagcttctggatgtcctccgacgctttttgagcccccatccgcgcagcatactgggccgagtaggcgtccatcgacgcaaccactgccgcgatcgacggctgcgagcccatgccaggcctcgggtgctccagatccgctccaataatgatcgtcggtgacgtactcagcagtggaagcgggtcgcgcagcacggcgttcttgccatccagtcgcatattgagcttcaaacagacattagcgcagaaggcagcgttcgccttgcgcaggttcttggaggcgacgcactgacaggagacgcccagaaccgtgtccgccattaccttaaccggtccatacagccacgaacgagtgtcaggcagcaccacaagcagcatttcgggcgggccacgctctgcgacgcgctggtagcagatgcgcaccaactcctccacgtctgtagtgcgttgatcattctggtggatgaacaccggatcgttgttcttgatgaagagtccacgctgacgcccaacgtcgcacagcatgcgcacaaacttacgaacaacagacgcatccacttcatcaagaatcagcacgccccaatgcttaaacggaacgcccttcaccatgattttgtccttgaggcgccactcagcgttcctgggacgctccgaagtgtttcgatactgcacacacggcggctccaactcgcgcgcatttgtcgtctccattttcagcatcactttcattccgaacgctgcgagatacgggtcgttcgagaaagtggcgtccttcacatggtccagaatgttcctctcacgctttgcaggaggaatagcagtcaacttcgtgatcgacggcgaatccaactcgtccgcgttggcgcagtgctgccccggtaccacctcgcacacttcgataggcagccaggtctctttgcctggacgtttgctgcctacgttggcgcacggcagtcttggatacttgagacgcttggcatacttcgagtcgaagtactccgcgacagtctgctctttgcccttgatattcaccagtagttgatctgcaggctcagcactgacgccgtagatggcacgagcgcggccctcacggtgcgtgggcttcacttcgacgttgtgcagtgcgtgcgcgagattcttcagctcgagctttgacaacgtgcgaattctgctcgggtccttcgcacgcagtgcactcaacgtcaactgcatgagggaccccggggtgtaaaagaccgcagaggtctcgttcagattcagaaccagcttgtcctccgccttccgaatggcttggtggtatccccagcacaactccttgcccccgtgcactgaatgcgggtccttcaacgtgtacaggtcgcgcccgacgacagtgagacgttggcacgccacgtgacgcgcgaccacgtccagagcttgcaggactggcatcacattcacctctgggtcggagtagtgttgtagtaaatccgtcatgcagatcgtctccaccagtcatagtgacgacgaatgtccttgggcctctgcgagctccttcacccccgtttgacgtcgtcgtaggtggaggtggcagtgtggacaggcttatgtccgtaaatgtctttgacgcccatgggagtttggtaggcgagtagagcgccgacattccgtcgtgcacgacgcgaatgcctgcaaactcttcttcgttttgacgcagcactgcattgactacgctggtcactaacgagcgctgcagtggccgatccggacgccgctcaggttgtggagcagcgtcgtcgccagcgacttgttctccagtttgaggaccgtacttttctcctccatcacgatcactagtatgcgcgacggtgacgtgatacttgaacacttggttggggccggaaacgatctcaacgccaaagtagttaatcttcaaaggcactgtcttgccattttggccaggggctggcggtggcgagcagaactcgacgctctttagcacatccggatcatcagacttgacgtcacggatccccgctgagccgctccactcagctatcacgttggggtcggtaatggcgtcgccaatctcctcgtacccagatcccgagatgaaccccgcgccaggctcgcccccaccttctcgacgacgatcactgcggtgactgtcacgtcgtcctccttggtcacggcggacgcgacgatctccaccgtctccgtagccacctccatctctgcgacgatcaccggcatcaacgcgctccacgcgtctgtcgtagcctcggtcctcgtaaccgcgtgagcgattatctccacgtgagtgggtatcgtatcggcttgctgcatcatattcgcgtgttcgagtgctgcattcgcgatcgctgtagtcggctctacggtagtctacatatccgccacgagaggaggaagaatgtccatactcattgtcctgtcctcgggggttataacgatccgagcgatcataacgacccccatagccatcgtcataggaagaacggccttgaccgtgagtcgtagtcgtcatagccatagcccgaattgtagttggtgctggaatgagagcttctgtgtccgtggtagccccgatcgtgcgcgtagtcgtcgtagtcgaacgggaaggagctgccgtagccccctccgtggaagtcaagcgggtcgtacgtggtcatttgcttctcctgcttcctctcctcaagcggcagttcgcgaactgaccgcattggccaagaactgggacccgccgccagcatcgcagtctcccagcacacgtcattcggcactcttgcattcggaagttgcagctacagtgcagcacagttagaacgcgcagttagtagaatagtcagtcacccaaccgtttagttagacaaagattcggcgacaaagatcccaactgtccgaacagccgcgtcccccactctgcaatcttcatcgggaggaccccagcaagcagtggtgatcagcggtgatcaagcagcagtgaccatctcccaatgcgccttgcccaccttctcggcgtcacgctggccgtggcctccgccgccgtctacgccgatgacgcgcctcgctgcttcccggcggacttcatgttcggctcggccacggcgtcgtatcaagtggaaggcgcgtggaacgaaggcggccgcaccatgagcatctgggacgactactgccgaacccacgccaagaagaaggtggcgtgcgccaacgtggccgacgacttctaccaccgctaccgagacgacatcaagctcatggtcgagacggggctgcagtcctcgcgcttctccgtgtcgtggtcgcgggccatgaactggaacccggagaccaagcgcatgcagccgaacccgcagggcctcgcgttctaccacgcgctggtggacgagctcaacgccaacaacatcgtgccgatcctgacgctttaccactgggacctgccgctggagctgcacacggagctgtcacctcaaggctggctgaacccggacatcatcaaccacttcatggactacgccatgctcatgttccacgagctgggtgacaaggtagacttctggacgacgttcaacgagccgctcacgttcacaaccgccggttacgcgagtggagctggagcccccgggctcaagaagtccgagaccttcgcgtacatcgtggcgcacaacgtcatccggtcgcacgcggctgtcgtcaaggccttccgggacctgaagacgagctctccgtccgtcatccaccagaaggcccgcatcagcatcacgctcaacagcgacgcggcgtacccgcttgacccaaagaaccccttggacgtagcagcagccgagaggaaaatgcacttcgagctcggctggttcctctcgcccatgatcacgggcgactaccctgccgtcatgcgcgagcgcgtgggcgatcgcctgccgcggttcacgctcgaggaaacggagttggtcaagggatcgtacgatctgctaatgctaaatcactatagctcaaagctggtcacagactgtggggtggggcctcactccaagtcaccatgcaagaagctaggcaagggctgggagcgcgacttgggcgtggacatctcgcactcgaacgagcttccgggctcgcgtcgctcgagcaaggaccgtcacggcagactcaactgcggctggttcacggcctaccctcccggatacctcgagacgatcaagtggctgcacgccgcggaccccacggccgacatcttgctgacggaaaacggctggtgcggcaacgaagaagtggagaacctggaccagctctggtactaccaggagtacgtggcgcaagtgcacaaggcgctcgtggagctcaagatccccatcatcggctacacggcctggtcgttcctggacaactacgagtggggctcgttcgagccgcgcttcggcctctactacgtcaacttctccaccaacacgggcgcccaggacgaggtctacgagccgcagccggcggggctggagcggatcccgcgccctgccgccaagtggttcggccacgtcgccaagaccaggtgcctcgatggctggacgtacgagggctcgaccaaggaggagcagctcgctgggctcgagagcgtcagcgagcagagcttctcgcgctggatgatgggcgtcatcggcgtgctggccatcgtcgccctcaccgccatggccgccgtggggcgcaacatcatggtgcagctctcgtcccccaacgcgcgtcgtcttcctcgcgagaccgacccgctgctgcaggccaacaccatgatctaaccgggacagctatcgtagaagcgagagagagagagagagagagaaatgcagcatgtgtaaaatcgtccttcaatcgacgttacagcgacaaacgtccaccggtgtccacgtttaagttttcaatatcaggtgacggccgagccggccaggaccaatacttatgcggtgattggtccaccttccacataaatgctcaccccgcgtcccatcaccaaaaggcagctgagtctgattagcagacgttgggtcattctggaatccgccggctcgagctcacgtcgcgtccgtcctggggcctccatgccgtcgcgcgcgtccgtcctactcgcgctatgcctaggggtcgtcgcccaagtcgcctctacctctgccgctgcagtcgcagccactgaggcgcgctgcttcccgcctgacttcctcttcggcacggccaccaccgccttccaggtggagggcgcctggaacgtctccggccgcgagccgagcatctgggacgacttcttccaccactaccacgaagatgtggggcgcatggccgccatggggctctcgtccttccggttctccatctcctggtccagagtcatgcgctgggacgcgcaggagaggaggatgctgcccaacccacagggagtagcgttctaccacgctctactggacgatctgcaggcgcgcggactgcagcctattgccacgctctaccacttcgacctgccgctgacgctccagatgcagctggagcccaagggatggctgaatccaggcattttgacgcactttgaagactttgcagcgctcgcgttcagagaatacggaggcaaggtcaaatactgggccacgttcaacgagccgttgacgttcatcagcggcggctacggctcgtgcgacgctgcgcccggtgggatgcagccgtcgagcaccaacacgtacacggtggcgcacaacgtgttgctgtcgcacgccaaggcggtcaagctgttccgtgaactgaagcagggagaggagggcttggtcactgctgacgcgcgcattggcatcgtgctgaatgcggaatttgggtatcccgtggacgaatccaacgctttggacgtggctgcggccgagcgcaagatgcagtttgatctgggctggttcttgacgccactggtgactggagattatccggagatcatgagggaccgtgtgggcgagcgtctgccgcggttcagtgccgatgaggcagcgctagtcaagggctcgtacgacgtgctaatgctaaaccactactatagccgccttgtcacttcatgtgagtcgaagcgctcggagatcagctgcgacgagctgccgctgggccacgcgcgtgatcggggactcgacgacacgcgtgctcctaacggtgcgcgtgcaccgcctgcaagcagccctgagtgctcgtggcttgcaggctacccggacggctacttggacaccatcatgtggatgcatgcgaaggacccttcaacggacattttgctgaccgagaacggctggtgtggggaccaggaggtagaaaatttggatcagctctggtacttccaggcgtacgtggcgcaggtgtacaaggcggtggtcgaagagaagattccaatcatcggctacacggcgtggtcgttcctggacaacaacgagtcggggtcatacaagcctcggttcggactgcactatgtaaacttcacgaagcaagacgctgcgacggagttggcacgaatcccacgtcctgcggcgaagtggtttgcgcacctttcgacgaccaagtgcctggacggctgggatatcgatatcgatactgtccaaatggacgccgaagaggcagcagctccacgagatacaatgcgcaacccagaggctgggggcaacgatgtgggcgtcccatggtctctcacggaagtcatcatactgattgcagttggcgttgctgtacttggcgccatcacgtgcgaagcgatgcgcgaactgcgtctcagtagccaggggtccccagaagagctgcaggtgctcattaccatcgaggagtgagggaatcgcacgtcaagagagatgaaccaacgtacggtaagataagatagtaatgcgactttcactcactcttgacgctacacttgttttttgttgttattctcgtgcggtgctcgatgcgtggagtcgccagcgacacggcgttgggagcggcgaccgctgacaaattgctaaaatcttttcgcccgccgacacgagagctcgagtctcaccgcacgaggtgcacgctgacaactagcttcatgaacgctacagactggtggttggctcgtatcgtcccaagtggttgcttggacatcggggtggcaacaaacgacgtgatgctactgcacagcttcgccaaggacgcaatctggactcttggcatcatgcttgcagtcgttcttgctggagttggtgcaacgttcgctgtggctcacccattgcgactcgggatacgacaccgtgagcatctgaacgaacgaaccccattgctagtttaataccgatccagtggtattgattgggatctattcaacatatcgtctacagttgtgtcgacttaccaatctgagcttgagctttcgtacagatcttgtgaaccaaaaagctcctgcgaatcgaccgttatgtccgagaacgtcagcggcttcaggtcgtccatacagcttgtgtctacgttcttgagtacaccgttctcctttacataggataccaaaatgaggacgccacaggtcgaaccgccactgttcataggcgtcgtgaacgtcgtgcagtggcccgcgtcgtcgaagtttaccagcatgcgctcgcctctcatcatttcatactccagctcgccgtacatgcggcgcgtttgcagatccatcccgcccgtcattagcagcgcggtgacaccgtccggcagctcgccggtcttgttccagtattgatcacgctcgtataccagcggccgggccaccggaaggtggatcagctcctggcacgcgcgctcacggcttcccgtgaacagacagtaatacgggagcgataggtagttgtcggacgccatggtggagttctcgtaccacgtgaggagcgtcgccttgtccggagtcgggctttcccacatctccgagaacacgatcaggtaatacagcatgtcggagtcatacagcagcgtctccggctcggagtcaccaaagccaccgtcgccatcgccagagtcgagtccttcagcgaagtacgcaagagcatcggcatcttggtccgtgcaccgcgacgcgcggtagatgaccgctgggatggcgatccgcgtgcggtcggacatgaggtactcgccgaaagtcgagcgcagcaggtaggagggtttcttgccgttcttcgccaagacgtcggcacaagcgttaactcccttcttgccattggccacagcagcgtccagcttgtcaaacagctcatgcacgaacgccgcgaggtccgtcacgccggggaacttgctcttgcagaactcatcggccaaacaggcggcgaggaacctgttccccacgactccgacatcgtgatcccagttcgaaaacgtcgaccgtttctccaccgtgtcgccactctccgaaacaattccatccactgagaatcctcgcacactcggaggggcaaagtgcaccagcctctcgaccagatacgtgccgtagctgaggccgtacacgtagacgtcctggtcgctcagctcatagtcaatgatcgcagccagatcttttgccgcgctcgtcaccgagaacgccgccgtctggttgtcgatctggaagcggatgtcgtccatgcacgcgggcagttcgtccagtcggatggcggagcctccagggctgcccagcgctccggcctctgcggcctggcactccagtcgggcactgcggcccgttcctctgtggtccatcgtgtacacgctgacctccctgtccagctgcaggtacatggtgttcatgagtccttccacgccagtggacgaggctccggggcctccttgcagcacccacagcgccttgttcttgccgccgctgggcgtggccgtggccttcacgcgcttgacgaacacgtcgatggtgttgtcgctcgtgcacacgccgtcgtagcacatgggcacgcggaactcgccgcactcgtactgcggactgctctgcgatccgtggcccttgtgcctgccgccgtgttgcttgcgctggtggattccgggtgcgttctgctcaggcgccgcctgctcttgctcctgctgcttccagtcgccgtgccgggcgaataaccggtcgaacgactgctgcaggaacggcagcgacgaagccggagcctgcgcaacgctggcggtggccctccgccttgtggggctggagtagctggctgtctcgaggtagtactggtccgggtggcccatgttggtggtgtcgctctgcagcgagctctgcgtgcacgggtaccagccgttgagctgcacgggcggctcggcggccgcagagctgagcgccgcggccagcagcaacgtcggcagcagcttcatcggatccaggaggtagagtaggtggcggattggcaagtgagatcgatcaatgacgagcgagaggttgcgtactccgatctatatataaggattggtaggtcggttaagtatgcgatcgtgtcgagtcaggtgagacggcacctatccgagtataacagatcgcagggaaaacacgcacccatatcagattttacaccgatcggtaccggtttagtggtacccgtaacttcgtgtaccactggaagaggtacattttggtcccaccacacgaaagtatccagtagaccaccgccatggacgtgccctcttggcatccggccaaccagaacgctgatgcgctgcggcgactggcgatgagcggcggcgcgcccgcagccaagcgcacccagttcacggtgatggccggctcgaacgtggacacgtcgacggaggcggagcggcagctggtggccaaggaggagagcgtcgtgcggctcggtggcggccgcggattgctggacccgtcggaccgcctgtacctggtcgagcagctcgagctggagcaggcggccaagggcagggagcagcaggagcgagaggccggtaggttcttctactgattgattcgtagtgcgatgtggacggggaggactcacggacgcgcagcgctgcagacgttccgctcgaacgccctcatagcgcacaagacggcggtggcgccggagattccgctggtcgcagcggccagtggcaagagcaagttgctgtctcctgagaagaatcccgtggtggtgatcaaggccaagaagcggtcatcgacggcgacagacaaggacgccaaggcgaagaaggccaaactcgcggcgaagaagagcgtgggaagtagcgctagtgcgggcaagaatgaccgagcgccgacaaaggaagacaggagcgaagcgaaaggagccaagaagagcgatgatatccctaacacgacgaagcctgcgacaaagcctccagcatcagcgttgttgctacaggactattcgagcagcagcgacgaggagtgagtgaccttgatgtggtgaggagcttcgacgttagaactgtgcaaaccatgtatttttaagggctcctgcgtgcgatcagcacagcagcgcaactaatcaaagcaatctacagcgaaatagatctccccttcccccctctctccacgtctgtctacttggtacctattctatcaacgtcgacagtgcgtcacaatgttctgccggtgcaacctgagcttactcgccatcactgtcgaaggtgatcttggtggccttcttgttgacgtcgatgttcttggcgaacgcgccgtacagcttgtgttctttcttcttgacgtgcgtaccgaacttggtcaggtcattgggtacctcctggttgctatcacgcagcaggttcacgagctcgccagctcgcggcttgtcgttggcggtgaagaatgtgtgggccgtgcccttcttaccgccacggccagtacgaccgatacggtgcacgtagtcctcaatcgtcagcgggaaggagtagttcagaacgtactcgacgccggggatatccagaccacgcgcggcgacatccgtagcgatcagcagcgggacctcgcccgacttgaactgctccacagcctccgagcgctgctgctggctacggtcgccgtggatggcaatgcagttccagccgcgctggtgcagcatacgctccacgcggtcagcctccttcttgtacagcacgaacagcagaacgcggttcttgcggctggagtggtacttctgcagcagcgcgtgcgcacgggcgtcacgggcacggtcgtcaataacctcgacgatctgagtaacgttgccgctggcggccagctcgtccgatccaatagtcaccttgacagggtcgttcaggaactcgtgggccagcttctgaattgactgcggccaggtagcactgaacatggcaatctggcgctccgggtgggtgctgccaataatggcgcggatgtccttctcgaaaccatcgtccagcatacggtcagcttcgtccagcacaacaaacgtcaccttggacaggttgcacgagcgctcctccaccaggtctttaaggcgaccaggggtagccaccacgacgtggacaccgtcacgcagcgccttcttctgcgcctgcttggggacaccgccgtagatgcagatgctcttcagtccgcacttcttgccagcctcggaaatcaccgccgaactctgcatggccagctcgcgcgtcggcgcaaccacaagcatacgcggacccgggtgcttgggggacacagcgggctgagccgcaatgtggatcaagccggggatggagaacgccagcgtcttgccggagcccgtctcggcaataccaatgatgtcacgtccggacgccaggatgggccagcactggctctgaatgggcgtgggcttgtcgaaacccttggtggtcttcatgaacttggcctcgaaggtcacgtcgtcgaagctgagcacggggcggtaaaggcagttgtttccgctgaggatcatctggttggcctcgtggaaggcggagacctcctcgttcttcatcttggccgtgtccttgccctccgtgtagaaggccttcttgaagctgccgtccttgggcgccggctgctggtacgggccgctggagaagtccgtgttgggcgcctcgttctcctcgtcgtcgcattggctcttcttgtgcttcttgctcttcttgtccttcttctccttcttgtgctgcttcttgggcttctcggggctctcggcctcctgctcctcgcgggcgcgcttgtgcttcttgtgcttcttgtgcttcttaggctgctcctccgccgggttctgcgcctgctcggcggcggcggcctccgcggccttcttggccttcttctcggccttgcgctgagccttggcgtcgttcacgtccgtcatggtgcctgcgtctcgatgtccgttcgactctgacgccatcacacgcaacaagcgcatcaaagcacagccagtgctttatgcagatggctacatcgcacgaaaagccatgtgagctacatcaatgtatccatctaggttttatcttctctccgaggtttttcagttcaaaagggcgttagggtttgagtgagtgagtgcgcactcaagaccctccgtcgacgcgggaaacctagagtgcgcacggaccccatggccgacgccgacgacgccgacgactcgggctacgagctgagcctgagcgcccccgtcgcgcgccgccgcgagaccatcacgcgccagctgcagcgcgagatcctgcgcgaaatgggggcggacaagccgccgcaggagcaggagcaggaggaggaggagcgcaagacggaggacgacgaccccgcaggcatcaggaggcgcacgctgtcgccgtccaaagccgcgcagatgctgcgggacatggacgcgctagatgcctccatctccaggcgcgacacggtgagtccgcaggcgctcaaggccgttctaagcgtcgctgagcaccagcagcaccgggaggaggagaggaaggaacaggtagaacactctcttgagagcgggaggacggagaacgaggagaatgtgctggactctcctcccgcttcggcgagcgagcagcccaggaagagccctctgccaccggctgctgcagaacacgagcgcaggaagtctgtcaacaccagcgacagcttcacagactccatgtttgcgcccaatctattggaaaaggacgcggctagtagagcgacgctggacccgacggaggcggcgtcggtggtcgcggcgctgcagaaggaggtgcggaacatgagcagctcaacgcttgagatggaggagaccgactcggacagcgacaaccagaagagcgctgctgctgctgctgcgcagcccaagcagtctaagatcaaggcgcccactccgctgagtgagttggctagaaagcggacgccgctgtctgcacaacaaagcaagcagtcgcctgctccggcgaaggagacgaagaagagcaaaccgccgtcatcagctaaacagcccaatgccagtaggacgccgtctacagcgaagcagaccaagagaaaatcgtcatccccgactgaagaggcgaagggtagaaagtcgccgtcaccggcgaaggaggcgtacaacaggaaatccccggcccaagcgaaggagccgaaaaggaagaaatcaccgaccccgacgaaaagcaattccaaccgccgggctactgttgaccctagcgacgtactgatgatgcttgagggcagctcgcagccagaggatggacgccggcagacaattgacgaaaacggattactcgagttgacaagcgcactggactctccgttaacaggcggcaagggctctgcgcgcaagcaaaacgaagagatctcgcgcaagcgtgctcatgattccgacgtgcgagaagggagcccggaaaagcgtgcacggtcggatggggataacaacggtgaccaaatgatggagtcgatggagatagactcgcctgtgcatagcaaggaaagttcaccttcacttcgaaaggcagcaaccaacgacaaccaaacacgagaggaaggtccgtcctcaggaaccgcaaagccggcgttgttttcacctccgcccacagggacgcgagtcaggactccgctgaaaggaattttgagcgctcgaaaaggaaagagaaacgcgatgcagacaacgccgacgaaaacggtgaattttggcccatcccagggcgccgagttcaatcatggatcgccatcgacgtcaatgacccccatgctagccaaggatgcctccaagcgttacccgtcagagctgccgccttcttcagaggaagaacccgacgacgctgagacatcactgaactcgtccattcttgatgaagccgattcgttcgacgaggaggaggaggaggaggagcaaccgaaagaagttgtttcgccgaaggtgacacaggtgaaaaagtccggttttgatctgttggcatcgcggagaagtagccttatggctcccaagtcagttgatagaagccgccgtcgacaaagtcttcgagggtacagtccgctggatagccaaactgaagcccgacgacgcaggcgccagaccatcaacatcgctcgccaaacctcgtcaaaggcgacacctgcgtttactactgcgaccaggccgatttccagctcgcaatctcctccttcctcgagaaataattcgtttttaagagcggccgacgtggcggagacgactcgtatgccttatgcagattcgtcagcgtcctctgacgctggggaggacatggaaatcacgggcgagtactcgatcgtaatgggacgtgatagcatagcaccgagcacattagcgtcggcatctgctggtatgcctcgagatgaagacacggcggagttcagcttgggacatcttctcgctgaatcatccgtatatgaattaaccaagtctgcacctgagcctgacctgaatgatcttcctggaacgctgggtgatctggctagtgaagttgcggatgtgccttcaagtcaaggtagccaggctgccaatgcctctcaaaagttgaatgaccaagacaacacactcgacccaattcaagaaggagacgaaaccatggcatcctcacgtggccagagcatgatgagccttgtttctagtgacgacagcgatgaggaatatgccgcacgccgaaagtctattaacgtaaacctgacacctcagttcgagcgggctagcattggcggtgaacccagtcaagctgttcaagccccaccgacacccgagtcactttcggttcacttgatcacgatggaagaacttctctcgtctgttacgcttgacgaaataaagtcagtggcggagaatgatgatgattttttcggagaggaagccgagtcttctgacgatctgatctcgacgagtgtcaagcttgcgtgcgcatatgatacgtgctcggaggcaatcgagtgccgtggtacagatatctcgtcgtggtctgcggatctagcggaggaattgtcatccctgttgcagatcaaggctccgggtgtttttagtccagagaacctcgatgatgcaggccgcgaggccattcgagagctgtacgctactgaggcaatgatggctcaaagtggttggtgccagctgcaaactcagatggaaaatcaactgagtagcagtttgtcgttgggtgcggatgcattaacgaacgatgtgaaaatgctgaagaattgcgtctccagcgacacgttgaaacgtcaaaatgaactcgctgctatcagggagatgatcgatcgtgaggaacaaatggcccttctgcttgatgcgatcgaggaacaacagggtgctcatgatgagtacgtgactgctgtgaaggatctcgagaatgaatgttcctcgctctcgctggaggaatctgtactacagagccgcctgaaggtgctagagggacgggcagcggaactggagccggtgacttcggcagcagcaacgttgttcgagcaggaagtgctggcgacggaggaaatgcttgcgatccaggagagcatgaccgtgtggaagattcgagaagcaacagcctctcttctgcgcgttagtgctcatttcgaggatgtgctgtttgatgtcgaagtcaacgtcgatgtccatttggggtccccttcaacgggtggcgcatccacgttgatcagagtgaatgagtctctcaagcagagagaacagaacacgtaccttcctatcgaaggcgacgtggtgttggtgttgcagcggctactgctagatcctcactacatttcacgcatcgctgacgagtctgaactgggagacggaaatgacggtcgcgtatgttccaagctgcagattctggagcatttcatcaacaggtctttccgtttgttgaaggagttacgcgagctctctacccactttgcgatgcgcttcgatgaagatgatagtacgctctggattgatttcctgaagttcccgtctaccttagctcgcatgagtgtcgaaggcgcgcacttcagcgttgggttctctctccttccagtgtttccatataccgactaccagacggctgtacaggtcccacacggagaggtatgttatctcgagttatccatgcgctttcatcgtggtcgacttactgacgttctttttgtttagatttctaccgaggacgtcaggaaggagatcgaactggtacctaaagaagcgccgaaatatttcacgcgagtttgtcggcgactccacgagagttttgtgcggtagcacgaccggcgtcggtcgtatagggttagtgtcggcgtgagctggaacgcgcgagctgcttagaactgtgaaggatgctcgcagctcggtgattctagcagcgttaagttatctattgtggggcggggagtgatacaacacgagcaaaggggcgagcaagcaagtttggacgtctggggtgtaaagtataatcaaaattgctgtggatcctctggttgtggtacctgcactggcccactcacttttatcgtgcatcatgttgtttagtcgtcccagtcgtcgtcgctgtcgtccgctgctgtctgagccgctgaagggttgactccagtatggtggttggagtgcagcgtcggctgcgcggcaagcgcctgcagaattgaagcagcaacaaaacaccacgtcagtactcgccccatcaacgtgtatcgctcttccgatgaccacttacactgagccgcgcaaattgagctgctttctggcgctccctctcctcctcttcgcgcctgcgggcctggaagtccaaggttttcgggcgcacgggtgcggtgtccttcggcttctcggagagcggcaccataccttcgtgtgtataacagaagcgaagagtccgggtaagtatcggtatgagcaagcacacaaggggtaagtagcaacgacataccatccggtcggagtgattcatatactggagcaacagtctcgcccgcacaccactgctcggcggtcacagttggctcctgcttgggcaccaagccatagacgtcgtcttggaagaactccttgagcttctgcgcgcgcgggagcgaaaatgacacgcgctccacaacattgggcgttgccaccagcaactgcgccaactcgacatcacgaacgttgcagattgtcttcggaagcagagccactccgccgatggtgtcggtaccggccatcatgaacggtaggttcgcttggactgtagctgctgtcggatcaacctcgtagctccagatgtgacgactacctgtgcccacaaggaagagcaagtgcgagctggcgtcgtagagcggtagcggtgtagtcgtgctagccacactcgcagcgggctcgaccagcaccggcaccccaacaggttccagcaagttacgcgagtcccagaagctgacttgcgtctcattgcgtgcgttgactccaaccgtcagcagacgcgttgagtcggcccacgtgacaaactgcggcttgctgctctcatggccgcagcccatagcaaccagcgcgtgctcagactggcgagggtcaaacacacgcacgattttggctcgacttgcagtggccaacagagagccatcattgctgaaggccatgttccacgtaatatcgtccagctttccctccaagcacattttttcttggccagcttcaaggtcccagaagcgcaacgagagatcgtgactggttgagcaaagcacgtcggcggctgtcgggttgaactgtagagctcgaagaccctttttgtgtcctgacagcgtcaatgccggtgtgcttggagcttcgaatgtctcgactgtgctctgagagtctagagaccagagctggatacttgagtcggtcgatccggtagcgagaatgtggtcgttgaacgggttgaaagcgagggcggaaacctcggccttttgcccgttaattaccggagcagctccatgctgtgcctttccagtcgcgtcaagcttctccaccagaacaggtccacccgcaccagcgatgggggctgcccagtacgacgcgtttgcagctatcacgggtgaggcttgcgtcgagaatgagactcgtttgtcgccaaagtggaagacgtcgttgcgtggggcctctttgccctgcagatattttaacttgtgtccgtatttcgcgccgagtcgctgcgctttgtccgataactcaacaacatccgcgatagtcattgaccctgcgtcagttgatggcacgtcaggcgtcggcgtaacttcggctggggcgggggtcacttcagggttttctgctgatgctggagctgtgttcgacggggctggaggaggtgtcggcgtagtagcagcattagttgtagcagcagccgtcgcgggtgagaacgaagagttccattgcgcagggggtgaaggtgtactcagagctttcggctccggctcattccacttcctggtgcttgatccccagcctgtcttgacatcagacgcagtttttgacggtacacttgacgacgctgttgtcgtcagtgcttggccccagccagaagtctgccatccattagccgcaggggtgccgttagctgctgcaccccaccccgacgctgcaggtgtgctcgcggcgggtctaccaaacacacttccagtcatatcctctgcacttttgactgttggtttgacaacctgcaccttgggctccgcgttgcgtccctgggcccactcctcagcagcaatcgcggcttcagtcgccaacgtgtccggatacaagtcgctctggaacgtatgcgtcgcctccttgcgaggcaccaggtagctcaccacttcacagctgcccccgacactgcttccactcgcgctgaggttcagcacgcgagccacttcacacacgttggtatcgcaaacagccttcggcaacaacgtcgccgccagcgtcatactccccagtgcactgtgatcaagcgcatgcacatacggcgcacgcgtcaagtccacctcaaacagcctagcgctgcggtctcccttgcccagcacgtacaacagatccaagtcggcgtcatacaacgggaacaattggcccacacctccggcatcgagccgctcacgatgcagacacttgcccaattgcctcgggtcccatattttgagttcgcgctcctgcatccggtcgctgccacacgtgaaaaagtgctgggtccggccgcaccaaaccacacttaagtgccgtttccccgtgtgcgccgcttcaatcgcgggggccgaagcttggtccactctcgggtcgaggatcctcacggcctggtcctgggtggccaacaccatggcgctgccgtcccaattccacgccgcactactcagcgtcgcattatctcccactccaacttcccaactcaacttttcagcttgcaggtcataaactctgagagacccggggcgtgagtacgtggcaacaatggagttcgcggacgggtgtggcaaaattccagccacgattccactagttgcatcttgttgcaaagttgccacgggggtcaccaaatcctccgttatgggatcaaaaacgggcaacttccacaccttaaccgtggcattggtgtcccccgccgacagcagcagctcctcgtggaacggcgagaagctcagcgccgtgacgcgccccgtcgggtgcgcgcgcaccagcggcggcgtggtagctgcctccttgcccgtctgcgtcaagggtttgacctgcaccgcaccgccgccatccatctggtgcgcgaaggcgaagctcgaggagttggcggccaggacgttgccgtccacgggcgaggaggacacctgcagctggtcgaagctctgctcgcgcggcaggagcttgcactccacattgcggaacttgctgcagcaaaaaatccgtaaacacgtatattgttagagataaatatggatagaaagtcgccatggacgtaggatagagcgcacctcgtgcggaacgcgaaccgcggcgccatagtcgaagagagcagggaggggggaggcaaatgacatgaaaaacgggatcagcttcaagtggcgtaatgttggccacactaaacatgtgtttatggacagcacaccgtatttaaatcgccgcctccgcagccgtacgtcagtctcaacccggtggtacagctcgaccatgctgcgtcgcgtgtggcagcgcgcgtcggccttgcagcctcgcgcgcgcctgtcgagctccttctccgtggccgccgatgtgcggccgcccccgcgcgagttcattccacgctccagcagccagcgcagcaattctacgcctcgcgacgcgaatcgaacgccaaaattacgctataaggataaatacgtgaatacgttgctgtcccgtaagacgacgcccgacagcttcgtgttcgcgtgtcgcgcgctgcgctgcaaggacgagatcgcgctgctggcggctacggacccgcgcgcgtggaacgaggcgctgcagcggcggctcgaagcgcgggacgagcgcggcgccgcggagctgctggggctcgtggccagcttcgccccagagaacgctagcgagcccgtatggatcgacctcttatttacggtgttgcaacagcggtcgtcccgtgcgttccgtacggcagagatccacgaggttctgggccaactcaagaaaagatacggcccgcagttcgtggcccgggtgctggttgaagttgtcaacggctgcgccaacaacaagatgctagccgcggcccaagagctgctactgtaccagcagaaactatggtccgagattcggaagtcttcggattgcggggtgagtccccacgagccattgatgcctcctccagtggtggggcatttaatgggccaaatgatggagaacaagcagtttaaggaggtgttgcacctgggaaatacgtatatcaccaatccggagtttgacgcggttagagatttccagcaacaagggttcctggagctgttcgaggcgagtggcaagacggagcaaagcgcgaggaaatttttacgcagctatttggacttcgtggatcggagcgtgactccatgcggtggggatttagagaaaatcaacgcgttggtgctggaacgaggcttcggagctgccatccagtgttgcgtaaccacgcaggagttttccctggcattgcactgctattcgacgatggagaacacgcgcgagaggattgtgggcaagcaagagttaagcgacgatgagttggcgagtgaagagaggctgcgtgtcgtggatgaggtgctcccggccgatgagaacatgtacgtgaacgtgatgaaggcgtgcatggctctcaaggacttctcgacgctgaaggaggcgttccgagcgatggttgcgcgtggtgtggcccgcagtgctggcttcggatccgcaatccgctattgccatgaaaacttggacccgaacttcttggaagaagtgctggaggaggtgtttacgacggaggaagaactcgcaggcgcctggatgctggaagtggagaactacaacgatgcgctgggctgctatgcggccacgaagaagtttgagcaggccaaggagctcttctcgcagatgttgaacaatccattcatccggcctgatcacatcacgatgctggagatggtggagaaccaccgggacgcctcaattgaggagatttataacctgatggacgcatttctccagtggcaactggcgccgaacctccaggtgttcacgtcattactgtctatctgcatgcgccggcgtgagctaggagacgctgcagcactcatcaatgcaatggaacaacatggcgtcgtgctcgacgtcaaggcgtatacgtcgatcgcgttcatccatgcgtcgcacggcgacctgaaggctgtggtgggcatcctgcgcgacatggctaaccagggcattgctaccgacacggtattcttcgactatgtcatgaatgcgctgtacggatcgtgcggaatcgacatgtgcttctcgctgttccgtgagctgagccaagagaacttgcccattccggaggggctgtacgtggcgctggtggagttaggcacccagatcggactgattgagcgcacgctgcacattgcgtacaacatggagtgcgaaggattccagctcatgtcggaccagcttcacgagctgatgatgcggtgtcactccgacgccgagatctcggagttcctacggaccttctctctgctgcatcagggcacacaacccgacacgccgcgctttgaggtggaactgtacgaagacctgatctcaatgctgacgcagaacagccgcaagaacgatgtcgccaaagtgatggagctggccaaggctgccgggcatagcgacctgattgtctagagatatttacctatagaaatgtggcttgactcttatattcgagtatttggtacctccctctaacggtggtagtttgtgttgtagctcctgtctgctgctgctggtgttgttagtatccgacgcccacgtacgcttcgagttgctcgagcacggactggtagaccttctggttggcgttgacggcccaggtgaagtccatgtggctgaagtcgctgatggtctcgtcgtagatgactgtggatagcggcatggcgttccggagctggtcgacgtcggcggagtcggccaggatgtcgttttcgccccggaagaaccccgtgcgcgggtacttgatgttagcgaccgggaaggccggtgggtcgaaggagccgtacttggccttgttcttgcagatgcgcttggagcaaagattgatgccaagcaaacggagacagctgcagccgtaattgtacatggagaaagtatccttgcggatgctctgcgcgtagtgcgccatgttcttgacggaggttccggccggcatctccgagagctaaacggccactcgcgacgagttccagttctccgagtcgcccgacaccagcgccagcgcagtctcacacagctgagggtctagcgtgcaggcagacgcgccgatgatctcctgcagcacctcgttctgcgagaggaactcgacctggcccaagacctcgaagatcttgtccaagtagattttggctatgaactgcagcgccttggccttggtgttgcccaaccaggccacgggggccaaggctgcgaagtacgacacggactgggccagcgtctggtcctcggagaaggcgacgaaagcttgggtcgtgccttccgagtggcctacaagtgcgacggtgtcttggcccgagacggcccgtacgtggttgagcatggccgggaggtcgaacctgcccatgtcctcccagctgaagtcccagaactcctcgtccccggtcgtgtacttgacgtggtggtccgagtacgtgttgccgcggttgttgccgagccacacgtcgtagccggcgtccgcaagcacgaagaccagactttggttgcggaagttgcagacccatgagaagctgctgtccagcaggccgtgctgcaccaggatggctgtcttgttgtcggccgcggcctcgcccgattgagtctccgcgtacgacttgggcaggcggtgcagcgtgaggatatacccgtcggccgtggtcacgttgtgcgtctccaccgcgtagccgcgcgcctgaatgagctcgacgatggacttgccgacgtccgggtccagtttgacttactcgacttcggtggactggtcgagtgggtggacgacgggtatcgttgctgcgagcagtgctactagcaggaggagtgcagtgttcgctaccatgacgcagagcttctcactgcgtacccgagtgcttgctgggcggggaatgtacagataacgatggaaaaatacgctccaccaaaaaatacgccatgcgacaagtcccgacttctgatccgatacaaaacaatgtttgtattttagccaatcagacgaacacgagctcgtatgtcttaccaaccattactacaaaaaattactggcacggagagcaccgcgaagcatggcatggaaagtgttcgctgtggtggacccgttgccagcgaacaccacgtccacttgccagcccctcgacgtaaacgtgatgggcccgctgaagtcggccctgcgcagtacatgggcttaccgcaaaagccccaaaacggcaaaagaaaagcgccttgatattatcgagcgcactatcatagcctggaacagccttgatgaggacattgtagttgagagttttgaaaaggcgcttcctcagcactttgaagctctggaattcttgtagccacaatacactccaccttttctttgtcacgaccgtaacttctttgtcgtctttttctacattattgacctttcaccatcaacccggcacgcgttgatcctgggattggaagtgcacagtgcccctgatttggtatacttaaaccaagtcaaagtgttcatcaccatgtcctctgcggcttcggccaaggactcggacgaccgacgtccctctgggcaggtcccggcggcggacgacgatcccggcacctcacccgtggacacggaggtgagaccaccggacgagatcgtccccgagactcagccggaggaggaagacgactttccggcggaaaggaacgagttcagcaagttgatgacgaacgacagaactcgccagcatgaagggttggacccggccttaaacgaagggagggcgagtgaggtggcatctgacgggcctccaccgcttcaaaccgagggggcgccccccgagacgaccgagacctccggccgccgcgagcaagtcgccgagatgagcagtcaccagcaggctgaaacgagcaagaaggccgagatggaggaagagagcaagcagccggcgacagcggagcagatggctgcagcgcttcagcactcgctgcaaaccgccacctatcgcaaaccccgaccccaggcatggatggacttagtgcagcagctctttgaaactgtttttcctaagagcccaagcaagaagaagtacctgtctgcagcagctcaacggctcccgcgcctcaccaaaccggagatggagcggctggtcgacgttttcgaagacatcgtggtatcccagcatcaagactggacttcatggtctcgacttgtggtggcgtcatgtcacacggtctacatctccaggcagtcgttggaatatgttcttagcaaggagttgggaaaggtctcgatgcaaactgcagagctccaagctccagtgctcacccaatgggctcaaaaggtggcggggcaacaggaaggaggaggttaagttggagttacaacgaaatacttcctgttcaaccaaagtgtgtattccgccgaggtaaccactcagctccggcaggtatgcgagaaaacgtacggtaagcactccaagggggcattcagggaaggaacggaagacgagtggagaattgttcaaggattagttgagggcacggttatctgccgtcgattgccgcagttcttcaaccgcatcatgcgaacagaagacaagttgagaattatcggtacagtgtgagcgcaggtggaggggcttctgattataggccttgatggtgaactgccagtcaaggaagcatttcagagcaccaaagtctacagaagagtatttcgatcgcggcgatgaaccatagcactaacaaccaacaactctggggactcctggcagccgtcaagacgatcagctacaacgcagcgaagcacgagattcatttctacttctttaccagagaggcagcctgtaggtttgacgggctgaaggtaccttttcatcgaacgacgcacggactagtcaatgcgcatcctgtgggaagacgaatacctggggcaaatgtttgggacctgcaatacgaagaagatggtgccctgatctcgacggcgtcagagtacgtcgtcattctacgttacgtgacgcggaacatggatctccttgagtttctgacaccatcagccgagttcagcggtccatcagcgcattcttgcccactgagctcggcggacggtcatcccgccgagtagaacttggctcctggtacgttgttccactgcggccttggagtgtgacacaaaacttgatgttccctacaccacaactgccccggccatgctacgagccggagtggtgagtggcctggccaaccggatgtgtcgcacgcttgatttcgtccaatcagatctgtcgcaaacactctgacttcacatttcccgaattcgagtggcgagaaacgcccgcaacgccagctcgacgccctcgttccgtgaaggtgagactcgcttgagccttgatctttggtataggccttgtctgatgcgtggactccgcgcctcatgggtgtgtacacatgtagatgcccctatcgctcgcaccaaaccccgtcgtcggatcacttcagcagcgaatcggcctggatggtcgtctcggcgtggcagctggtagcaggaactgaaccatacgaagtcagatggtgcccctgtagtactagcgttgatgttgggcctgccgcagcaaagcgagtaggtgatgcaggtgtcggggaagtgctcgattggctgcaataccgacgaagccgagcatcgctgtctccgtcaaaatgagcggccatggatgctgccagcgactcggctgaccaggtaagcacgttcctctcgtttcggtgcgtcgagtgaagcctgatagttgtcttggcatgatacaaggcaccgggaactcggcaggtcaagaaatgcttccccgatcgggccgcgctgagctcgaaatccaacccaactgagcttattggcgagaagtgcagcagcaagttgaactcagctttgtccgaactcggttgtcctgacgactagctgctatccgctgaccttgaactcggctggacttgaacacagcctccgcttcatcgactcaactagcctggtaagtgtttgccccactcactttggtgcgttgagttagccctcaccgttgctgtgtcattgtataaacgaacaaggcgatcccgatgcgtttgatgctccagtcgagttgtcctgaacgggccgagctgggctcattggtcaacggaccttgacttcggcatgtctccagctctgttagaccagcttaccccgactgggctcagcttggttgggaaggtggtgggcaagctcgactggaacagcacttcattcggtcacatccaactcggctcgccgcgagctcggctgcgttcaaactcagtttgaattcggtatcttcggttcagctgtgaagcgtgttcagactcagctcggctacacctcgaactcggcatgagcgctctccaatcgaaacatggtgcgtttaccagcactcaactcggcgaacttccgaacgtgatctaactgaaactcggcgtaccgcaactcagcccagtgtttccttccgttgaagtgagtacacttcagattggcgacatccaacacacggcactactggaactcggtatcccattccagcttgatcgtactccaatgttctcggcttcgcagcaacccagtgcgaacgggacctcattcggacgcagcgtgatctcggtctcgcttcaactcggctctgcttaaacgcatctcggcttcagcttgactgtggttcaactcaattggtgctgacctcggctgcatttgtacctgatcccgatcagctcggattcaagacaaacctctgctgcaattcgcctaggcgccacttgatccctatgttttgtggctctgccacgaatcaacccgggtctagcttgactcatgtccacctggcattgattccgcttcagcttagcccagttgagcaaggtgataggcaagctcggctgagcgaacgacacagctggctgcctgaccagctcagtcccttagcggaagtatcagcgctttgaaggggtgtttcgactcggctatgctcgacccctgaccaagctctgctcatgttggctcaatgtgaatacgaccgcggccgcgtggaatccattcctcttcagtccagctttggatgcttggtacacttttgcgacgccgtgactcggcgatttcaccgactcggcttcaggctgaccgcagttaaactcggtggtagccctacgtcggatcgattgaagtcggagtccatcttcaaagcaggtggctgcttctgctcagctacggatgaactcggccccccccccgttcgagatcgctggtacgtcgacattctcggcgacgcgcctgcccagcgtgcctccgctgagctttgctcaagtccagctttgctgcaacttcggtttgttcaccgccgccgcgcatcgaccgctcggctagtcgcctctcggtaaacatggagtgattacggcctcactggaacatcgtgcgaactcgacttcgcttcggctttcctgtttgagcgtggctccatatcagcacggcttcgcgtcagcacacctgcgctccaactcagctttagtgcacaacgcgaagatcgttcaccgacttggtcggaggtcccggcggtcgtacccaagggtgtaccgccgcatatcacacacagcgccccagtgggtagcgtgttcacggacccagtgacgagtcagcacagctttggtatcgacggctgactcgctcaatctgtgcagacgcacatcacctccctcagcttcttcacagggtcgtcgtcagaccagctgggcttaatcgctcagctcggcaactcggctgagacttcgatccgagatgcggattccaccagcctggtggcggtggcggccgcaccgatcccaacgctaacccggcgaatgggcttcttgctttccagctccatcttcgctcactccatttcgatatcatgtaattcatataatccatacagttgacgcagtatcattcttcgactcgacccagcctgctgtcttcactgagtcggcggatcatctctttggtgcaatagccttagaccgcatctgcaactgcaccatttgcagacgggtttcacatttcttcgattgcccctagtcgagtggaaaggtttcccacgagacgttcggcaccgaatcccaactcgggcatttcgcgcttgatgccctcgtcgctcgttgtatcagaggcggacggtcccctgaagcgacgtcttgactgtcgtcgtccgcatcatcaccgagctcggctgcgaggtattgttgggctcgtcgaggtttctccatgcgcccaacatgcagcgagaactcagctgccccgctgagcaactcggctttcttccattcttcatcataatctccaatatttccatctcttcctcggtcttaggtgcggtcgtcgccaaaccgaacggttgggaccgcttccatcgtcatgtcggcgatccttccgcaagctgagttcggcttcgtgtgaagcgaacccccagccgtcgctggactggcccagctcggcaacgatctccccttgaccatcttgctcagtactcgaaacttggttaacttggtaccaacgaaaacaaaccaccctgctcccgggtcgcggcaccagttgtggtgtagtagcacgcacaacatcgtcagatgtggcaccctggctacaaacacaacaacagccgagctagtcggcccttgttggcctgcgctgagatgtcccccagcggttcggcccttccgggacagtgatgtctcgtcctcgccgagaccaagtaccccaagccagtcaatcacggaagccagctgagttacctgactccggaattagaaatcccgtgccctccgccaaaggacggacgacggcccacgcgggcttttacgggtcgccaagagcaaaggcttctcgactcagcaatcagtgcccgggacgtacgggaacaccggctcgcagcggtggcgagccttttccttcgtgcttggcgagacacgcgcccaacccgggccgaccttaatctcttggcgctaccagtcaacaccctacaagctatgcctctcgggtgctgacagcagacataatcccgtgcagggacttactggaagcgcgtgcacgtgttgtggacctagaaatttctgctctgttgtttgttatctctgtcgggcgccctgaaggggcgcctccactattcctaagctcctatacaaatacgaaatgaaagtgggcggttttggatctcggccgacttttcaccgagctcggcgacgcttaagctcggctaagccggataacctgtccggataaccccttgaactcggctgagccggatacggcgtgtccgtataacctggcgaactcggctgagccggataaggtgtcggaaacccagtgaagtcggcggagcgacccgcgaactcggcggggcgactcgtaaactcggcagagcgaccagtgaactcgactgcgcaactcccggactcaattgagcctggttaccgtatcggacggtacatggtaccgtttagcctgagctcggcggcttgaaccccccatgatctctgctgagcgtgtccagtgccttcctgaactcggctgggtcttcattactgggtctgccacgtgtcaccaggtcggggccggtgttccttgagtttctgacaccatcagccgagttcagcggtccatcagcgcattcttgcccactgagctcggcggacggtcatcccgccgagtagaacttggctactggtacgttgttccactgcggccttggagtgtgacacaaaacttgatgttccctacaccacacaaacttcccagtccagcaaggacctgtgccggctaagagtgctgacaagaccccgaatcctgacaagaagaaagggcccgtgagtggcgcgcaccaaaacgctaaagctgggtcgcgattcaatccgctgactgtggagtcgactgacgagaaggcgtcccaacaagacgagaagaagccagaacaaccgaacaagccgaaacccacggccaaagtaatccgtaaagcccacgccgaactactggtagtggaagatgctgccttagcagagctagccgctgctcttgctccggttcctatgacgcaagagcgagaccacgtcccgccagcaacaagtgcgaaaacccacggcgaggaagcactagagaagtctctgtcgcgagctcttgtttctatgggcctccgaccagtatccactccgagatccggaaactgccaggtctacttggtggcccaagcgttagcgagctgcagcttctccgacaccccggatcgccttgttcaagcggtcacggctttgaaaataggatgcgcggcgagggccttcatcgatttcccgctgaaatacccacacgcccagcggaagcagacgctaatacagctcggacgtggctacgagaagatgacacaaccagtctccgaggaagagtaccgacgctacctcatagagtatggatccagctcgtcggaccccgctgtcttcctgcccgagaagctttggggcagcaatgacactctcgctacctatggaaccatgctgcaacgagacatcttcgtcatcagctttgtgcctggcaaaacgatctggagtgcacttcattatgaaccggaaacacgccatgccaacaaaaaggatttctcgacttgcggagagtttccactctctgctgaaggctgtgtgaagaaagtcattgagctcaaacggaaagcgaggtcaaacgacgacaatatgccgcttgttcttcactaccataatcaacactatagtgtttatgttcacagtactccggctcaagatatcgcagctgaagagggagccagcgaggaggacgtggagatggcaggaagtgacgatggggacctggaaactaggcggccaagtgcgacggagacgacggacccagccacggaagcacaagcggctgaaaagggtgatctccctcaggagactgaagcagggagagggtggtatgaggagatgaagacggaagaggacgcagagccgaacgctgagtcacagtacgggtcccagtcaccgtgggacccagaagcttggagcggcaacctagaggaggtagaagaaaggctgagcggcccgacaatttatcatacgctcaagcaagagattgaccagattctccgagttggcggcgagcgcacccaagagttactacattttctcgttgccatggtgtcgcagctgtcgcttcaccagcaaaaacggcttctagcagcggacttaagcgatcccgagcagtgcaagaaatacatggtcgaatttcaaatcccagagccagtggttcggcagtggcgccaacgtctcgaggaggagaagagcggagacactcagccagtgacggagctccgacgatttatctacttcccgagtggctgcaccccggcgaatactcaggcgtaattcctccccagcagcccctggtaagcgggcgcacgtaactactccggttgagcgtcgtgtggaagatggaatagtggtgaatgttaacaaccgggctgtgctgctgaaaaagcgaaatagtgacgatccaaccaagaatctgctcaccatgttcgaagaagtggacagtcccagccgattgccacagccgagtactccggaaggtatgccaagttggccaaatttttggagtgcttacgcgggcgaatgggcaccgcattctgacgtaccatttccagcggtggacgcctcggttgagacctggttggcggcagccaagcaagaacgagactatattcttcacctgctccgcaccttcggtcacagccacgaaatagtgcagcttctagccccgcaagtgctggacgagctaacttcaccttggcgagacgaatgctggcagacggcgattgaagcagggcagcaggatgagaaaacagatccgacccgagttcgccgtctcgcgcagtgggggcttcgaacagagcgcgcggttgataacaagcggaggaaggcaattatgaccagtaccgacgaatgggacgtagaaatagcagagaactatgggcgggacgtagtcatgtggctatgtgctccatcgcggacatctcgcttaagcaactacatattgtttgcgcacatttacgcagagaaggtggccgcaatgattggcgaggacagccaccctgatgactcagcccagaccaagcttcaacgacacttgaccgctcttcgcaagctcccgaccttcaaagctgcattcctgacaaagcgaccgatattaagatcatcactcagaacgtccaaggatttagttctaccaaccgatgggagtggctgtcagcgtggcgaaccattcctcgagctcaacggcccgcgctgattcttcttcaggagacgcatgtcagctctaagaaagagcaagctgagctcgaggagagatggaatcggatgtggagtcttccgcctggacagccttcgctgtcatattggagtgtagcaccgcagaaaacggcaggggtgggcatcttagtttttccagagttccaatccgtgattcaaccttggagccagcagctttggaacgagcgggcaattggagtaactttccaagatatgcacattctgaatgtgtatgcgccggcgtcgaaccaagggactagagaatctttcttcacgggcctacaacgatggaggccccgtcataccgccaacctcatcttggcgggtgattttaactgcgtggagtctccggtactcgatcgacgaggcgggacaagaatcgacaaaacggaaagcgcaactctttcccggatcgtccaacaatcgagactagttgatgctcgcgtccaacttgggtcggccctggaagagttggagctagcacctcacgagcattgtacgttttggcgtggcgaagtggctagtcgaattgacagattctacatcccgtagagcaaaaccccgtggttacagtggctacacggtcaacttccaccagtgccctcagaccataacgaggtcacgcttcatctgcgcaattcagcatcgcatcacgacaaacccgtcgagcgacgggtcaattaccccattcatggggcagactcggaacgtcaaattgaagaactgctacgggagctcaatgggaaggcgccgcagcggggtcctggttatctcagctgggacgcctggatcaagcaatgtcgaaatgccataaagcacatcgctcggcgagagaaaaagcgcagaaggcgcaagtcgaataagctgcagaggcagttgcgtgagaacgccaccagccgcacgcaactcctgaccgcattggtccaagacgtgcgggaccgcagtgctgctcgctttggaagacatctcgaacgaactcaggcggacattcgctggctgtttaagcgaacggcagtctgggaacgcgatcaaactgtttcggctatccaagctccgtcaggggaaacctttgacgaatctcacgctataccagaacgatgttcacgtgtgtgggcaacaataatgggccaacgtcatagctgtctaaccccgcaacaaatggaagtagctctgaaggcgtttgctaccgttcccctcgagagacgagtgcaagtagaggacaataagcggcttctggctcctatcaccgaagacgacctgcccgccgcagtggcggatctccaacggagcaaagctggaggtgaagatgggctcaacaacgatttctacctagatctggcggcatcgatgatccctcggcttgtgactgtctgtaacgatctcctacaaggaagccccccaccagactccttcctgaaagccgtggtagtgcctctccggaagaagggagactcgccgaacgccttagattatcgtccaatctcactccttcaaacaagctacaaactgttcgcaaaagtattggcaacgcggcttcaaagatttctcggccgtctactcaacaagttttcgttcacggccggcaaatggaccggtccgtggtgatgatgctagctcaactggagaatgcaatttatgacgcctttatcaatgcgtcggacagtgcagggatcctacttcttgatttcgccaaagcctgtgatactgtggaccgcgtctttctcctggaagtgttacgtcaatttggttttgcgccggaattcgttgatctcatggctcgactgcatgaaggaaccacagcacaatttttcgtgaacggccagtattcttcgccgctagaggttaaatcgggcatcaggcaaggatgtccgctagctcctctacttttcatcttagcggcggaatttttagcgctggcgcttcaacaggatgagcaactgcgcggtctgaaggtctcgaagagcccgcgtcatggggagcacaaattctcagcatttgtagatgactccacggtgttaccaagggttatgaaaatcgtcgaacactttggtcaaatctcggagctcaaggtgcaaccagccaagagtaagtttattttcttgaataaagcgatattagcggagaattggtgcggaattccagtactacctgtgggagacacagttcgctatttcgggtacgacgtgggtttcagcgatctcagcaaagtcaattgggccaaacggattcgcagcattcaccgaagaatggcaaccgcggagcaagcagcaacgacagcgcgcgacagggtagatcaacgcaatcgtgctgcctgcggtgctgtttactgcaaaaatgtttcctcctaccaaggaggttttgacgagcttagtcaacatgcagaagcagttcttgtggcggcggcaactcaaagatgatcccagtcgacacaagttaacaccgagtctgatcttcacacccaagcaagccggtgggctgggtctaatatcagtgcccgtggcgatccaagcacaacgggtgaaaatgtcaatgctgtggctactgagttggcacgatgtctaccgagaggcctggcttgcatggatgggttttcacggagacgaaccagcagtgacaccgcgaaaggacagtaaaagccgttgtcaatcgacggggggcagtcgccgccacctctttcagacagaagtctgcgccgctctagctcctacagaagctgaacagcatgaacgccaggaattatcggcagtgtatgttccacgactggcagctgcagccggacagcttgcgaggagcgcgacctaccagcctcgatcgcttgaaataatcaccgtcgaagtggatttgggaggtctaccgtcaaaccgactggaaatactggagctcacggcgttctggggcacattcgcatgggcggataacccgtggatcccagatagtaataagccagtgttatcgcgagccaaatacgacagaatcgcggtagcctcgatcgcgagccttgaaatcgtcaggactcacagaacgacctacacggtacgagtaccaacagcaccgggatgtcaggcgggacaccatcgccaaactggagcgatggttgatcgctattctgctccactcgtcccgaattgaagtgggagaacaactcggtcgagccccacagcttcaattacggaaaccaccgcgcctcacgcaaagttacgtctggtcagtggaggctgattctattgtggtgggagtctccaatgcaggaaaatctacaatcacgctgcagcaacgggctcaattggaaagtcgtatcgcagtgcaatgccaaaaaggacgcgacgaaactatccaagcacttggagggagtagtctttcatgcacaccccaggattcacggattcccttggcaagtaccagcaaggacccgaaatcgaaacattataagggatttgaagatgcagcctaagaaacagcttcgggtacacgccagtcccgacctcgataagctgctcaagaggtgggaagtccgaggtgaacgagatgactggatacgaggtctccagagtcaactaccgcaacagctttggacgcatcgaacacgttgacaaactaccaggtctgggtggccgatcgaatggccgctcagcaattaaatttgcattacgaaggcgagcgtccgacggatggctgtcttctcgcccaggacgtcacggcaggcaaggtcacgttcacgcacattacatggggctgcgagcgagcccaacagttttggagtcgttgtggagcattggctcggccatgaaatatccagcagtcgtctcgaggcgtataagagttacatctcgtcacgggtggctcctcctgtcagtgacagaatgaggcgagtgcttttggaatgctatggtaaatggaacaaagactatgaagacgctctcggacggatctggtggagtctgtgtagtatgggatacgcactgctgtggcaaattcgaaaccaagtcgtccacgaaggaaagaaatggagaattggaatacatgtgggccagctgtctgaggcaaagatcagcagtggcacgcagtgaacggaacaagccagcaaccaggacaaatgggcttcggctacagctcactctggattgctatatagccatcacgattgaggctgaacctccagattcacctccagccctagcgccgtggctcaagaggaaggagtcagcgctgatcaaaagacttagaaagtttcaggaggctattaactaaggttcaatagactaccttctctctctctctacattattgacctttctctgggattaagacctcacttttgaccaatcagctcaactggcgtgttttttggtagctacctgtttactatggaggatagtggtcagtgctggcgtattttttccgtggtcatctgtactggtgcgcggagctgtggaaatcgcagactggagcgggtgcgcagtctcaacactgtcaacagtgttgagtcaacagcatcgttgttgacacgggtgcccgcagatgtttgatcggcgaggcggccatgatctgcagcgccaccaccgactgacattcagtcggctgttgccgctgtccgctgatacattgttgctgagagagggggcaggtggttccactggcggtcaccaacgtgtggagtcaacgcggaggccaccagggacttgcaccgaaagccgcgactaccccgactcgaagtgggacccgccccacgccagcgtgagtcgttgctgcgcttgtaatggtccacggcagatccggctaccgcatcatggcatcggttgtcggggcgtcgccatctactgtagtcacgtgaggctcggcaagcaccggatcggcgagcttttgctgggttttcgatcacctgtcagcaggatgaagcactgcgaggtgcgtgcaagcctctaaatgtctatcgaggtggaggcgcttgtccccccatcggactcgaggcatttgcctgatggacgtcgaagcttgtcatctttcgtcgtggtgacgctgcggtacacgccgagagccaagacgcagctattgacgacgaagcagacgctgccgaggacgtaggacgtgatggccgtgttcatgtagtgcgtgccgtcgtccgcgcggttgatgtactcgggcaggtagtaccagctaccgacgatgaagaacacggagccggcgagagtactgagcgccgccaccgtcccccaacacaaggcgttcgtgatcctgaagcctgaaacgcgcgggtcctcgtgggtcgtgcagatgaagaggatctcgacaatcgcgccgatgcagaacaggacacacccgttgatgaaggcccagcacccgagctccggggatctcggataccaggaagggaggaagtagagcgcgcccaggacgaagatggatgcggccatgtagttgcacaacgcggtgaacgcgcggagcacttggcgcagttgcgtgccgtggttgtagcggatgctctggatgaagtcgaggttggcgcctgcgaagaagtagagacagccgaccacgaagccccaactggcaaacaggacggcgttgccattccacttggccgcgtactccgggtagaagaagatggagccgagcagaaacagcagcgagccgatgcaataggccgaggcgcgcgacacctcgagccacttttcccatgtttcgagctggtgattccctggcagcagcacctgaggctcgtggtgggggggaatcttgaccgtgaagtccatcttgcgggggttaccgcttcgcatgagctctagggatgcttggtcactcaacgaagaatccgcgaatgcctgaacgcttgcacagaggacatgacgtgcgagttccggacaagattagcgcgagtgagcgggtaagacagacaccgagatccaagaaaaactcccaagctgctctggaattgctggccaagtgggtgccttctgccaacactcgcggtgaatttgctcagttcggggctactgaagaactttcacgagtgcgagcagagcatttgtgatgtgaacaatttcacacttatcggaccccttggctgagatctcaggataccgcgcattgacgaaacttgacattggctccgtgcaatgttcgtccatcgattattattagtggattccgatgttgtggcatggtggaggaagatggcgacaaatgtagcctccacctgagtagtgaggatcaaaacggactcaagaacttcatgttgctgttggcggtaattctctgggctttggtatggcggcagtcaaaagacggcaaaggaaggggaagttcgaagcagcagacacgttattgacgtgctatgataatcctgtacgatattcgttggttatcttgatgactcgcctaagttgcatgacatcttagaaaaattgtttcgtactgcctgccttgtagggtaatgagtcagcgttggcttaacgagatacacttgcagtatcatcgaagttgaagcgaccgaaacaaagatatcgactgtagaatctgacgtgtgcaacctaacatttatgaacttcccgagtcgaagatttttgcaccgacgtgggcatgatcacctcgttcaatgttcgtcagaaaggtacatgtatcatgaagaatacctttgccagcagcaaacatccgagctgttgcaccagcggacactgaattgttgtccacctccagctgtcagtcgttgtccggcttgccaccaaattcaagatttgcctgcatgttgagacgaacccctcactccaacacccaacctccaaacctcgcgtatcctaccgataaacgcgatctccactcaggatacccaaacgagtgcacaagcacaactcccgcgtggcggatcagcgccatcttccgacctttggtccgcacggaggtcgtgttgcttggtccccggactgcacctgacggcgtgttttgcttgacctcgcgtgtccgcggagctctgccgggcaaacacggctttatccccatagtctccctcctgcaatcccgtctggtcctctcgcgtgtcatgcgccctactgtcccagcctacaaaagcattcattgccgaatttccagcctgacgatcgctccaccatacaccaccactccttcccaaagctgtcaacatgccaggaatcacgccgcggaattcgaactactcgctgcagataacgcctcggcttccagggccggacgtgctgctacctgagaaccacctgctcgaatcgtgggagaaatggctcgaagtctcgcgcgtgttggcctacttgttgggctcgctgctcttcctgctgggctccatctacttcttccccaagtactcggccgtgtgggacggcaaaggcggactcttcggcagctgggactttgtggtcggctgcgcgctcttctggatcggggccaacctcgacttcatccagacgatccggtacaaccaccgcacgccgctgcgtcaggtgctgcgcgcgttcaccgcgctgttcaactacatggccacgtccatcttcatcctggggggcctctacttcctcccgtcatggtacgtcaaggcgccggagctcgggtgctgggccttcatcatcggatgtgtcctcttctgcctcgccgcccttgccgacgtcttgttcatctgcatgacccacgaggacccgcacgactcgggcttccgagtctcgaacctgttcagctgggggacgctctcggtgctcgggacgttcgtcggcgcgctgtgcttcatcattggcagctggttctacatgcccgggttcatcaaccgcgtcgacgaaggcacgcactacatgaacacggccatcacgtactacgtgctcggtagtgtgagcttcatcgtcagtagcgcagcgatggcccccgacgtctatcgggccatcaacgcaaccagcagcagcaaggtcgacaagtaagttaatatcaagtgtgcagtactgtatcaatgtcaatggaaatcgaaatcttggatcggtctatcgatgcacatggaagccacgatggttatcagcagtctgctcgtggcgtggcagacctccattggctctcgatcttcgttcgcactgcagcgaccggctcagagtggcaatggctacacggagacgcacggggccgatgtggtgctgtctttgacagactctgtccgagccttgatagagctcattacccgatagatagcctgggaggtattgatcgttcgagcagcatgaaggtgtgtaagttccagtcccaggggctcatcgtgttggtgtgcctcatcaacatgctcaactacttggacagaggcatcatcccgggcgctcctcagagcttccgacacttcatcacgtcgtcgctcggcgtggccgtcacggaccagtccgtgtacttcgggctgctgtcgtcggccttcatcatcggccactcggtgctgtccatcaccttcgggtacttcgcgctgacccaccggccgttccgcatcatcgcgttggggacgagcatctggatcgtggccatcgtcatctgcgccgtgtcggagcacgtcaacagctacgcgctgctgatcgtcgggcgagtgctaagtggtgcaggcgaggcgtcgttccagtgtgtagccccgccgttcatcgatcgccacgctccgcccgaacgtgcatcgctttacgttggcatctacctggcctccgtgttcgtcggggaagccatcggcttcgtctacggctcggcgttcgcagactcgtcgctcacgtgggccggcggctactatcttgaagcagttctgatggtcttcctggtctgctgctgtttgttctgcgtgcccgatgagctcaacgtggtgcctccacaggacgacgtcgcgctaaggaaatcgctggtgtctgtatcgacgcaggggctgccaaacggagtggagccgctcatagtgtcgccagggtcgtcgtctccggggctagcggtgaggagggagccgttcttccgcgcatggtggggtgtgctctccaacctcccgttcttgctgttcgtgctgggcaacggtgcgtacacgttcacgttgggggtcttcaacacgtacggcccggacctcttcgtcggcctgggcctgttcagcgacgaaacctcggcctcgctggtctttggcatcatcgtggctgtgggcggactgctaggcacacctctgggcggctacctcatcgaccgacagaccaaggacaccgatgtgcctgggaagcgctgcttcgtggccatgacgtcgagcttcgtctacgtgacgctggccgaggtgttcatcctcatcatgtgcttcctcggaggggccaaggtcgcgttcctcgtgtgcttcaccatcggcctcttctgcatgtgcgcgctctgggggccccaaatggtggccatcctcgagctgttcccggagtcgcgccgctcgctggccatctcggccaacgcggtcatcatccacatcttcggcgacgtgccggcgccgaccatcatgggcgtcgtgtgggacgcctgggcgcccaactgcggggccgtcgagggctcggacggcgacgccgacctcaatccgctgtgcagcgaggaccagggcgggctcaaggacttcatgctgctctcgacgctgtggatgctctgggccgtgctgctctgggcgctggccgcggtggccatcaagaggaggcaacagcgcggcggcttcgtgctcaccacgccggcagagtattagagagaggagaggagggtagtcatcgccaccaaaacacacgtacgatacttgttaaacgttgagccgggtccttacggtctccgctggccaagtcgaagtgcaggttcaacgcggatatcagggctctagccggactaatcgacggcttcaactgagccgtaccacggctgtcctgcccctcctcctgctaccgccggaagcgatgcacgccgggtcttctctcacacaccccactgcactcttcgatctgcgcgctgggagccacacccgaccagcatgaaggcctgccagatccagtcgcaggggctcatcgtgctgctgtgcctcgtgaacctgctcaactacatcgaccggggcatcatcccaggcgcgccgcagagcttccgacacttcatcacctcatcgctcggcgtggccgtcacggaccagtccgtgtacttcgggctgctgtcgtcggccttcatcatcggccactcggtgctgtccatcgccttcgggtacttcgcgctgacccaccggccgttccgcatcatctcgctggggacgagcatctggatcgtggccatcgtcatctgcgccgtgtcggagcatgtcaacagctacgcgctgctgatcgtcggccgcgtgctgagcggcgtgggggaggcgtctttccagtgtgtggccccgccgttcatcgatcgccacgccccacccgcgcgtcggtcgttctacgtcgggatctacctggcgtcggtcatcgtgggcaccgccatcgggttcgtgtacggctcgctgttcgccgagtcggccttgacgtgggcgggggcgttctactttgaggccatcttgatggcgtgtctggtcttctgctgcttgttctgcgtgcccgacgagctgaacgtcgtgccgcctacagatgacgccgtggcgttgaggaagcccctcgtgtccacgaacgagtttgccagcgaggtgatgtcgctgtcccgggaatcgcacgacaccgtcgagaagaacgcggccgacctgtcgcccgagaagttcggcgccgagatgatgttgtcgcccgaagagttcaacgagtccaagtccttccttcggacgtggtgggagatcctctcggacgttccgttcttgctggtggtgctggctcatggcgcgtacacgttcacgctcggagtcttcaatgccttcgggccggacgtgttcatcggtttggggctgttctcggatgagacgtcggcgtcgctgatcttcggcggcattgtggctgtcacgagtctcatcggcactccgctaggaggatacgtgctggatcggcacaccaagaacacgactgtgccaggcaagaggtgcttcgtggcggtctcgtcgctcttcgtctacgtgaccatcgccgaggtgttcgcgctcatcatgtgcttcatctcggacagtaagggcgccttcctcacgtgcttcaccattgcgctcttctgcatgtgcgcgctgtgggggcccgagatggtggccgtgctcgagctgttcccgtcctcgcgtcggtctatggccatctcggccaacgcagtgatcatccacgtgttcggggacgtgccggcgccgatcgtcatgggcgtggtgcgagacaagtgggctccaaactgtggcacggtggaggacgatggagacgcagtgctgaatccgcggtgcagtgaggaccaggatggactcaagaacttcatgctgctctcggtgctgtggatggtctgggccgtgatcctctgggcgctggccatggcggcggtcaaaagacggcaaaggaagggaggcttcgtgctcactgcaccagcagagatctaaggatcgaagcagtattgatgcgtaatgaatgctatgctaactcgctagcttgttcaatgactcgcagcatgcactcgggcatcagctcacagccaaagcgtatgccttgagccagctcacatcttgcacgtagggtttgtcggcttgtagtggcgctcaacgagtccatagatgtcttcgaacgcctggaacagcgcgcgttgaaactccggtgcagtgactcggggaagtcgagaacctggtgggcctggcagcagcttgtcacggtcgctagagtcgaacgaggtgatcatgatggcgaggaaatcattttcgcagccgtagcagagcccgatgccgtggggcagcatcggcacgaatccaccccagagccacgggtacccggacacgttgctcgtggagagcacgaagttgccgccccctccactcttcgcgtagctcggatcagtaaacagcgctggcgggctccccgtcttctgcatggctgcgatctgcagtccgagtaaatggcgatcgatgccatcacccgacaatgcctctagcgaaatctctttgtggcgagccatggcgcgcttgagcttgtcaatcacttcagcttcatccacaccaggctgatcatgcatctgaagccacgcgagcagctcggtggtcaccgtgcgaatggtttccgtgcgtccttcgacgaacatgcgcgtgtggccgctctcatacgttggtaccacacgaccaaatagtcggaagcctgctagctgaatgcccatttggacgaaggtgtcggggaacagcttcaccgcgcgcagtttggtcttgccaatagccttgttcctcactacgaccatacgcaacttgcctccgttgcgttgaaactcagccaaggccgtcggaatcgtattcgccacaatatcctcgggtaaacgccagcgcagcagctctggtggaggcaggaactccagtgaatggtggcgactctcgatgaacgtctcgtagccgccatcgcggttcaaatagcgctctcctagccagcggaacatcgactgcagcaccgtagcgtctgcgttcgcgtgctccatgttggcccccaccattccgttggcaaacacgatgtactggaagctcttgtcgaaccagcggttgccagcgtttgacgccgcacactgtcgtgccagctccgacggtgtatcgggcgacgcagactcgaggcagagcgcaaagagactcgtttcgatcttgtcaaggctgcgctcgttcagcggatcgaactccacaagggcttgacgcgcctccgcccacttgtcacgcctcatggctgtcaacgcccccacgaactgcggcaagtcatcgtcgtcacgctttgaagtaggaagagaattcaggtacgccgagtgccgcaaaatgtgcaggagctgcacctctaggtctccaatggtcaatagctcgtcttgggcgtcgtacacgtgcaacatgaacactctgccttcgcagaacacggtgatgtggcgaatggtagctggatccacgcgcttgaatcggtcggtcggcttctccgggatgcgacaggtggagaatagccgtcggaacatgttcatgcacagcacgtggccgcccatcgtctccggtggcaccagctcgcgtttgagtcgctccagatactcgcaagtgtagcgcacagtctcggcagctcgtctggcctgggacacaggccggtcaaagtcttggaaagagccgaagcccgtcaccatgttcacgaacaaggcgttgggcgtcggatcgctcagatacgccacttgctcccaccattctgccagctacaaggcaaaccaacaccttcagcctacaatgcagctatagtgctttggcttgcattgagtccttacccagttatcgcgctctttggcacgttgcaatagctctgcctgcagctcttcgccctgacctccaggcttgccgaactcttctacgagctgcttggtcttctccagctcctccttggtgacgagcggctctatcgagcgcagatacttgtccagcgtggcgcgcagtgggggcacgggaaggtgaggcaacgacgtctgcagcgcgtacctagacaacgtacggcgaagattaataagagatcaagtgggactcttgttgcagaggcctacttacgttgaggagcgagatgccattggtctgaagcgtcacctggccggccaaagcaggaatggcaggtgttttgtttaacttcaacgcgggtggtagacgatctcaaatcgtcctttgagaatctcttctttcttccaggacgtcgcaagttttgacttcaattcgactgcaagttcatttttttcagctaagaaacaagctagtgcacatgaataatttgctgcgctgggaaagaagacgctcctacactttggctgtccttgattccgcctttgtgggcgcctgacgtgaaacttgacttgactcggcagccattctgagcctggcttcggcctgaatgctgcgggttcaccatcagaccacctacgccataggcgacgcgctacgagactgactgctcgagctgtcggcgcttcgggtgctcgcgatggagctgcggcgctgcttcttcatggcgcgaagcacttcgttcagcggctctcgcacgcgctccataaggcgcagttcggccgcctcgcggttcgcgcgctcttcttcgctcagtacatcaaaggcagcatgataggccaccgtgaaggtcatgtccggcacggcccccaagatgctgtcgacgatgagcttggcgcgcggaatctggaagctggacgtgacaacgtgcacgcgctcgatgcgcaggtgccgcagcgacggaatgagctggatcacgttgtcaatcatagtcgtctactcaaagtgaacacgccaccacggatcaagtgtcagtacaggaacaccacctgtcaccaatgtaaaacactcacagcggagcagtccatcatgatgtggtgcggagagatgcccgcctccactagttcgttgcgaatagcttccgtctgcacgatcccctccctctcgttctcccctcctgttgggacctgcatcatcaacatagatatcctcgtcagctctctaaacctgtaagtaaaaagtatcttgtggccgaatcgtacgaggtagcagaaggcgttggcttggtgctgcgcgtagactttcatcgtgtcccagtacagctcggcggccctggagatgcgcgtggctcccagtggcgttacctctccgcgccggtcgagcgcgtcgcccaggatgaggatcacctggctgtcggtcgtggcgtggaacgcgacggcgtcatcgtcctccgggatgctcttgaggttgggcgagacggcgggatgccgcggcgtatggcgctgcgggtacacgccgtcgagcatgagcccctcgcggaagaggtcgagccccgcgacggccagcagcgccaggttgtgggcgcgcttggcctggcggcggccgagcttgaggggcttcttcctgcggccgctcatcgagtccagcggcaggacggtgccttccatgcggggggctgtgacgtccacggtcacattggacggccccgcagtacgcgcgaagcccggcgagcagcggaaagtggccggcattcggggcagagagcggcagatcaggtccgggtcgaggcgagcttgagcttgaagagccgcagagaaaagtggacgttgtaaggtgaagtgtaccttatcattggcacagcgtaccggtaaacacggtacaattgtgatcttgaagcgacgcacgcgcggaggtatcatagctgctggacggagaccatgacggacttcgatgcgctggaccaggtggacccgttctacatggcgctgctgcgctcgcgccagcggcggttcgcggactgcatcgacatctgcacggacatcctggcgcagaacccgtacgaccaggccgcgtgggtcaccaagaccaaggccatgaccatgcagaacttcatcgacgactcggagctcgaggaggacggtgctgcggacctgctcatggacgacaacgtcatggcatccatgccgcgacccgggacttcgctcaaccggcccaactcgcgggccggcacgggcgacccgagtctgcggcccatgacgtccaccggccggccgctcagtggtttcgcgcggcccggaacgagctcgaggccggggacaagcagcatgtcggtggatcgcgcgctgcagggcaaccggccaggcacatcgcgaccagccacgacactgggacggcaggtgcggctgggcacggcgtcgatgcaggcgtccgactcgggcgtgttcatcgacgtgaaccgactcgacttcaagcgatacgccaagcggccagcgatcgcgaaggcactcgttgactacttgctctactgcgagcacaacccaaggaaggcgctggaactggctgcagaggcgacggttgctgcggactacaaggactggtggtggaaggcgcgcctcggcaagtgctactaccaactggggctcttccgcgacgcggagaaacagttcgagtcgtcgctgcgcaaccaggacatggtcatcacctttttggagctaggaaaggtttatttgcgtctggaccagccgaacacggcgctggacaggtatgagaagagcaagaccaagttcccaggggacgtccagctcttggttagcattgcgcgggtccacgatatgctcaacgacgtggagaagagcgtcagcgtgtacaaagaggtgctgcagctggacgcgtctaacgtcgaggccatcgcgtgcctggcgtcaaactacttttacacagaccacccggaggtggcgctgcgctactaccgacgcctgctgcagatggacgtgaacaccgccgagctctggtgcaacatcggactctgctgcttctacgcgtcgcagtatgacatgacgctctcgtgcttcgatcgcgcactatcactcgcgtcggacgactgcatggccgacgtctggtataatatcggccaggtagccattggcatcggtgacctagggcttgcctaccaggccttcaagatcgccgtgtccgtggatagcaaccacgccgaatcgtacaacaacctcggcgtgctggaactgcgcaagggcaatctcgaccaggcacgcgccaacttccagctctccgagacgctcgctgatttcatgttcgagccaagctataaccgcggtgagtcatgcgtgctctcaaccattatgcgtgcttgtctgtcatgccaggatcctcacggttctgctgtgatttgtgttgcgcgcttcaacgtcgatcagcgctgctggcgtacaaggtcggcgacttccacgactctttcaccaaggtcaaccgcgcgctcaccacgaacccgacgcacagcgactcgctggagctcaagaagcagctgcagcagttcctcacgatgctctaaccagcagactatggcaggacaaggagacaaaagagagatccgcaaccagccaacacaacaaccaactaaatcgtgcatatatgaagaataccggcatgccccgagtgagagagaaagcgaggaaacaccttggtcaagtgacacatgacatcaaccagccaaagcttcctcaccaacccgtcctcagcctccacttgtcttcgggtcgaccaccacctatctacctacctgctctgctctgctgttccaggcttctcttggttgtgattctctgcatctctgtcttcctcccttccgtcggcgggcgaggctttccttctccctttcgccaccgccatcacgtcccactaacgcatcgctcgctcattcattctttcattcacactgctcgtcttacaggaagtagtcgggcgtgcgcttcttctcattgaagctgctgtcgcgcggggccgggtcgaactggatgaacttgcacgtctcgtataccttgtcgccgttgcggtcggccatgacctcgtcgatctccatgagcgcggcctggttgccgcagcggtagcagtagtttggcgcgctgaagatggtgacgacaccgcggttgtgcgtccactggtagccctccatcacgagttggtgcgcgcgcgcgatgaaagtgaggccgttgctgcgcttgaactgctccgtgatgtcctggccgaacgtgtagccggcgccgcgcggcgagatgccccatccgcagcggtcgtccgggtcggaccacacgaggtcgcacatggggccctcgtggggcacctcctgcacgcggtcgagcgcgcgcgcgtggtccagcgtgtcgatggacggggacaggccgccgtgcatgcagaagacgcggttctcgatgagcgccgtcatgggcaggtggtcgaacaggtccgtgaagtacttccagacgttggcgttgccgtacttgcgcaggcactcgtcgtagaagccgtagacctgcgtgatctggcggctctcgtggttgccgcgcaggatcgtgatgcgctcgcggtggcgcaccttgagcgccacgagcagagccacgctctcgagcgagtagtagccgcggtccacgtagtcgcccatgaacaggtagttggtgtccgggcaggcgccgcctatccggaagagctccagcaggtcgtagaactgcccgtggatgtcgccgcagaccgtcacggggcagcgtacgggctgcacgttggactcgcccgacaggatctccttggccttctggcacagctcgtagatctccgtctccgtcaggttctcggcgcggcgcaggcgctcgatctgcgcgtccagcgccttcatctccccgcgcgagtccatggcttgacctaggtcttccttcgtttaggtcttcgtgttcttggtggggaacccctcgactgcccgctttcggcccccctccgccgccgcggctggctatgtgggatctacatcctgtcagaacgaatactccccaccaatgagcgtcttcgaacaagtgtaggatagaacctacatcatagataaaatgtggcaggtgagaccgtttctgcccaatcagacgagagttgaagtgagctcagctggctaaggatagcaaaaggacgggagctaaatgcggacgttgacactagacagcgtcgagtaagtaagtagcctgcgccgcggtcattccggcaagaaaccaccgagggggaggaggagacgtaagataagagtgagagaaagagaagagccctgcagccatgtccaggaagcaccactacgtgcccaagcgcgaggccaccgacagcttcgaggagctctcggccaagctcacggccgacctgcgcaaccacgtgcgcttcatggccgactacccggtgctgtcggacgactggatccagatggccgagcagatcggccgcatcggccacatcaccgagatggagcggcagctgcccaagaagcacgacgccacgctctgggagtgcgaggagatcgccctgcggtcagtgagggcatagtgctgcactctatccaggccttggcactgactgtgaacgttgctgttgcgcgtgtttagctatctgcttgaggacgggaagttgaatctgtaggtgccgtggcgttttaggtctttagatcttgctgtacaaggcacagaggtaatggtggcatgatgctgcaggtgcctgcgcaatctcgtagactacaacaactacctgaagcgcatgatcgagcgcgggcctgtcaaggtgaggcagcttttaggggttggtattgcagataacaccatagggctgactgagcaatgcagactgagacaatggcgacgctggagaagtttgagcacggcatggggctaactctgaagaacgcatggcttcacgccgaggcagtacaggtgcggtctgtgtcagaaatcgatgtgtgatgtgacttgagctaacacagcataaatctcttcagactacggatctgccgctgttgatcgagtatatccacgatattttaatctattgcctcgagcgcccagatgtgagcagaaaaacaggcttgttgcgctaatgatggatcgaacactaacttgtatgttcggcttctgtgtgtagtacctgccgaacaagaagatggacaactgccaggaggtcaccgtcatccactttttgctaggactgtgcaggcagctagactcgatcgatgaatcaaggtaaggaaggatttgctagcagcaggaataaaaatcgcgacgtccctgacctcgtttcgctgtgatccgattccttgcacttaccagagtcatgccgttgtttgccgagaagcgcattttcgcgctgctggcgatgcatctgagcacacacatcaacctcctgaacgtacgtagggatgctgctgcatgcgcttcaacagtactgcaacttacctaaatttgtttatatacgtaggccgcggatgtcgccgtgggtgcagaggtgcttgcacttatctgcagtacagaagactttgaatctcacgacgactactacgtggactcccccgaggcagagtccgctctcctatccctctacggtgcgtccacgttgccgcgcatagttctctgctcgtcaactaagctcacgcttctactttatgctgcagacgactacctcgaggaagcaaccgaagacctcgacacacgcaaacgattgcgtccgctgctcgatgcggttcgacagctaaactacaaccgcaagtagctagcccgctctcaaccaacctctcgtcgcgttgtcggtcaaacacagctcagcatacagtcacatagcgttgctcaatccccactcagccgagctgcatcgagacctcagcaacgacgactatactgcatacgtactgaatactgaacatcatcaaccccccccccccccccaaaaaaactttgaagtttcccttgtggctcgtcacatgtggtacaatgtaccacttcgatccaccgcccactaatcaggttagatttgctcttctgaatcgaacgcaccaagcagcaggcaggcgacgcctgacttgcggccgcgcgcgcggccttctcgctctcttcctgcgcccagagacgccgccagctcctgctccggtgacatacacagctattacacccgcgccatgaaagccggcgccgccgcgggcagcagcagcacgtacgagccgacggtgtacacgctgctgctcacgggcatgtgcctgctgctggcgctgttcctgctgacgcggctgctggtggcggtgcgtaacaagaacaagctgctggcctggtccacgggcttccacgtgctgtgtctgctctggacgggcgtgcgcgccgcctactggatcatcatgtcgatgcagtcgagcatgcgctacctgacgctctacctgctctactggtcgcccacgcccatccagttcgccaacttctcgctgctcatcctgttctacatccaggtgctcacgggcccggagtggcgctccaagtggcgcaacgtctgcctgccgctctacctgctgctgaccatgaccatgaccacgttcacggtcgtctgggccttcaactcgtccaacgacatctccaaggccacgcggcgcggggacgagtacgaccaggagttctccagggtctccgacgtcagcgtgcagctcaagtactcggccttctgctttttcctgctcagcgtgctcttcggattcttcggctggaaaatggccaatgtgcgtggaatttgctgttaaagtggcgttggaaccatgagcaagctgacgtagagtgtgtattttgttgttggttggttgttatgccaggtggaaagctggaagcgaaggcggctcttgatctcgagaccacgggtaggagtcctccgtgccgtaggttgctgtggggctggcagtttgttctgacatttttgttcgtggtctgagcagagtctggcggtgatcaactcgctgctgtgtgtcatcttcttcacacgagggatccgggatctggctacgtctcagagttggttcctgagcatctggaacaacctggacatgaacggccgcgtgacgacggtcgcgtacttcgtcttcttctgcttctgggagttcctgcccacaatactgctgctctgcttgatttcctcaaaggccggcggcgtaggaggtaagcgacaacgttggcatttatcgaagacgttgggacttgacgagaaggagctaaatggggtttctggtcgtgtagctccgaagcatgggcctgcatcgcagaagctcccggattttggcattttccatattatcaacacgggcgagggcaaggtgctggctgcaagcccactgggcgctagcgcctacagctcttacggaacccgtacagaaggctcggctggtgccttcgagcgagaacccgagcgcgaacgcccgcggtggacacacggaggtgacctcttccaagaccccctacgctacgactcggatgatggaccggtgccatcacctcgccacttctcggatagttacaatagtgctgcgagcaatggcaactactacaacgaacgagtaccaggctattcgtccggaatataagtatcatttacctgtgcactcagtcggctgcaagaacggtggtgtatgtagacttatctacctttacttgtgttcgttctggctggcgctcgtggggcgaggggcattccactcaatgacatactcagcgagtcttcgcccagtgagtaaccaccagccgtccctcgttcgctccgttcggagtgtggctccgtggcgaagtaaacggctggtgagcggtgcttttccctttgattcgggctcctcgcgtgtttcggcggtgtctcgatggtttctggcggactatcctgcatgtccacatagctctgcgaccggttgattttggcaaacacgagacggaggacccgttcacggtcctcccagctgagctgccgtaagtccaccttctcagtaaaatgctgcggtgggccaggaggtgccgagtctcgtcgtggtgcagggctgttgggcgaagtcagctttgggaaccgtagactgggcttgataccttgcgcacaattcatctcgcgatggtagtgctcgacctcgcggtcgtgtttctccttgcgctcgcgttcgacctcgcgctttacgtgctcgagtgagtccaggaagaactgctcgacgtccgtgcgctggttcagaatcgtttgcgctagtcgcctcaggtttcgcagctcgcggttcttgagtcgcagcaacttccgtaagccttccacgtccagcgtcaactcctcgcgctcgcgctcatggcgagtggcatgtgcgtgagcatcccaagacgcagcagcgagacccgcaccaagcttctgctcggcttcacgcagactggcacgcagttgagtgagctctcgagcttgtcgctgggcctgtttggcgaactcggcctccttctgaatctggagctgcagctcgatgttgagcgtcttggcccgggcctcgaactgctgcttctcgcgctgcagctcctccgtcatctgcagctggaagcgcagctcctcgcccatgcgcttgttgtccgtcacgatcttgcgagtgtctgcgtcgagcccgttgcgcgcgtcctccttggcctgctgcttgacgacctcgatcttcttctcgtgctccttttgcagacgcgccttctcctccaggaactttcgttcaagcgcgccggacgtctcacgtgcctgctctcgctccagcgttagctgcgtctcgaggtccttcaacttagtggcgatgctgtccttcatctcgcggaacagttcgagctgatgcagctcctcgcgcaagtaaaatatctgctcggacgcagcttcctccttggcaaccgcttgctgcgtgaggtgctggcgctcggaatctcgcgcctgctgcatctgctcaagtgcgagagcatgactcaatcgcgccgctgcgagctcttcgccaagcttggtgagctgtttgtctcgggtctggatctccttctggaagtaggccacgaactcgtgcgtctcctgctcgcgcttgtcgtgcctcgcacgcagctccgcgtcttcgtcttgcagctgcgcgacgcgggctgccatcgccgccagcttctgttgatccacctgcttgttgaacagctcggccgcttcgttggcttcagcggaagccgaaccgatcacggcattgggcttctcggcctccatgctgcacccgctccacaggtaatgctggcactagcgttgaagtgagtgacaatgaacaaactatccctggctcaccttgcctctagacttggaactattttggagaagtaccagtgccctgacgcaccatgcaatgtctttagcaagagaagcccatccggagaccatggtctcagatcaaacaggacttgaagtgtattgtatcggtcgtttacggcgggagtcttccgagttgcatattctttacaacgtctcaaggttgagcagcgtcgttagatgcccttgttgtaagtcaccacgcgcaccggttgcccgtcctgcttgcgcgcagcgggctgcagctccggttccaaatacttggtgtcgagttgagccgtctggcggaacagaccaaacgtaagtggcacggagaactggatcgcgcagcccaccagccccagcagcgtcggaacacgcagccaccgcgtcttgggcctcgtgaacaagttgctgtgcctttcgatcctcgagatcacgagcggcggcagcaacaagatcggcgccgccgcgaagattcgaccggtggcgcacgacgcgactgcgagcgccccgcacctcctcgacttgcccacgtagtctccgttctcgtcgtacacgtggacgcccttcaagtactcgctctgccgcatgaccgccatgttgagcaggtccgcggctgccacggcggcaaacggacccatgcgcgccacagcgggggcccacttggcgtccgtcatgcggctggccagacggcgcacgcccagggacgcgcccaccgagctggccgtggcccccacgtaggccgcgagacgctgctgcgccgtgtcctcgttggaggcgttgcggttggcgtagtagtgcagcgcgttgtacgtctggttgagccactgcgcgaagacggtggtcttggtgctgttggccagcagcatggcgccgtccatgatgacgttcatgggcacgatcatggacgcgcgcagcggcgtgaagaccggctcgcccgtgtccgggtgcaggatggcgtgcgtcacgtactgcgcgtgctcgagcttggcggcgtccacgggctccccgcgtcggtgcgccgccaccagtcgctgcgcctccgccagcgcgtgctccgtcgtgaaggccgtgcggaagtccagcatgtagaaggtcttgcgcacgcggccgaagtacgtgtcctcgttcgggtccgccagcttgatgtgcgtctccggcgcgctcacggccgccgccagcaggtccttctcgctctccatcgcggcagtcggcgggcaaggaagtaggtggtcgagtggcgggcgatgggggagctaccggcggggctgatgaggtggtcgttcattttggggggatgggccaagcgctgacgtcggcggtcgacgtcgtcgacctggcacaacttcaacgtggtgtacgacgggtgtggcacaagaagcgcataagtacggtgcaaagatcggagtgactcgatgggtgcatgttgcagtgacgctgctgctggtttcaaccagcctcgtggggatatcaagcttattaccgagcatatcatcatgcgtctgcgcgcggcagctaactactactacttcaagtacaatcctgggggcttctgctggtcttactgcgtcttcttggcgaccgcagcggcggcgggcttcttggcgctgcgcagcaggtagcgctcgatgaagaacttgaggaagagcgcaaagtagctcgagtacatgatgatgccccacttgaggttgtccgggtccacgctgcacgtggcgccctgcttcatgtagtacacgttgaggccgcacacggcgacgcccacgcccatctggctcagctggaagatcgtcacgaggcgagcccagcgcggtcggtagccgcacgccgtcaggaagtagtagaagtacatgatggcgtgcaccgagtagttcatggccacgaagtacaggccgctggacacatcgggcggacaaagaaagagtcagcacaagatccacgatccacagagcagcaccaccagaacgaggacactcacctagccgagagcgtggcgaacgcgtgccagcagaagagcagcacggtgatgtggtggtaccagtgcaggaagatgagcggcttcttgcgcagcacgatgaaggccgtgtccacgagctccggcaccttggagaagatgaagagcatgacccagagcgccacggggccgtggccgtagtgcggcgtgggcggcgcgcacaccgagtggtacacgccgcggcggtagacggtgttgatgaggaagggcaccgtcctggaggcgccgatggcgctgaacgtggccagcgccaggttccagagcgcgagcgggctgcagagtatcccaccatctcggtgtcagtttcgcgaccgcatacaaactccaagagagcgagagtcagacgcaacgtacactttgaggttgaagggcttgaggtcgcgcatgacgcggcggccggcgaagcacagcacgcagtaggcggcgcacagcgccacggccatgggcagcgactccatgcagaagcccggctcccacgagatggcctggcggaagatacgagagaagttagtgggccgtcggttccaggcatagtgtagctagtgtagtgtacgcacccagtcgcgctcgtactgggacgggtacatccagcgcagcgccggcacctcgtcgtgcagcttgggcgtgcgcgcgaaggtcgtctccatctttctttctgcggtcttgctgctgctgctgctgctggctgctggagctccctccgctctgctctgcggcctccgagggtttttgagttgtgtgcgacgctcttcgctcggctcgcgcccgtttgtgctgcaaccgcctttgccggcgggtttggagcatttttcgcagagctcacccactttgtggcggaaaatcctgaattttcgaaaaccatactgaacgcaggtcactcgctgcaggtcgactggcggcccgattgcgcgcgggcattcgttacaaacacgacatgaacaactgcaacccgcgggcggacaggccagcgccgacgtcgcccgcgttcggcccgcgctgcttggagcgcgcaggcagctggagatggctgcgctgcacgcgctcagcactcagcggcggcgccgacatgggagccgatctcgccagtgcggatgagcggctgggacgcaccgcgcggatcggcggcgaggtggtcagtgaagggcaactttggacatcttgggtgactgcgctggcggatagtataatacatgtattaataatacatgctacaacatgttacaggagctgctgttggcacgttcagctgcgcctgcattgacgaattttaccgtagacacaacttgctttggcggcggcggctgcggctgcggcagcgctggtgttgacggatttctagtcgagccacggcaaccaagcccaagcagccagcaggacttggcgaacgcaaagcaggcgcgcgacttggcgctcggcaatgccactttccctccggtcacgagtgctctcactctctgcatttcgcacgcattttgcctggcggagctgtgttgacggtccgcgccaagcaagctggagcggtgactgtaaacggatgtgctgcgagcaggaccagctcgcctcgcataaaaccatagcgaggctgtcaaacagagacctgcgaacagaacaacgagtgattcttatcggtgtgtgtgggggggggggcaacattcgtgacatgatacgtaggtctcggcaatgcagtcgtgtccactggtactcaggatacaaattgtacttgtctagcgttgcagtcggaggttacagttgtccagcaatttgttgaacccataaaagtatcggatatgactgagttttcctacatctccaaaatgtcatgacgaactgagccaaccgaataagacgcgtcttcttatttggatgcaggtgggtcggcaaagcaggccctggacccgcacgggcagcgctggcacgtgcaacctgcactcgcttgaaacgcctcatatagctgacatgtacgcctcaaaaacaattctgcatgtgacctataaatcgggaacgtaaacatcctacatctgccagttgtctgcgaagcgtcgcgatatttctgaagagttggcgagcagctccgccaaaatggcgggggcgcggtcttcggcgctggcggtgctgctgcttctcacgacggggacgacgctgctgctgcgccaccagacccaggcccaggcaagtgtacatgtgctctcgtagcgatcgaagagagacggagggggaggggcgtaaacactctctcgtgttcgtcttctcgcgcgagtgatcaatcggctcgggcatctgctatgcacatcgttcgaatccgctgactgacgtggccggcgtggactggttctgtgtccgccgtgaaggttgcgctgcccaaggtgcggcaggtctggataggtgagcgcctcgccgctgcaacgcgcgacacgcccattgccgaacgcgccgccttccggctgctgccattgacgctgcctttgtctgtggagcaggatgtcttcctgaccaagtggaggcgtgccgcatggactgccccgttcagtaccaggacccgcggcgatacctgtgcccgtgctacaggtgagtgcgttactcttgcttcaagcgcgtgctggcggtggcgaggatggccggttgaaccgtgcggccaccgccgcaacttgcacgccttctgcgcgcgttatcgacattcttgacgatgtgcttgtgcccgatatgggctggcgacagcaagctgggccagtgtctggtgcgcatcggctgcagcatgaagcagcgcgtggacgtggccgccttttgctcgcggcgcggctactgcaaggacgggtactgcgagttccgcgccggggacctcacgccgcgaggcgacacacgcccggaagtgttcgagctcacgtctgtggagacgccgggcacgccatgcgttgacaactgctgcccctcgtggaccaactgcacgcaggacgcgacgatgctggcgattcggacgcccgggcgagtctaccgggaagaagaggtgctgctaccacctcgagagtgagttctgtagacaggaagcgcgtgctatgacccgagcttctactgacgtgcctcgtgtgcttgtcttgcaggggcgacccaagactgggtgttaaccagaactatgaccgaatgccgtacagcataccactcgcgaatctaccgtagccgacaggtttttgcgaaaggagcgccggcaactgcatgccaaggaacagaccttgcagttggtgagtgaggtgtggagtgcgatggtttatagtgtttgaagaacgacttgttcgatcttactgaagtacttcaagtagtaacgagtaaagacttcaagaagtttttactagctcaaaaatggttgaaacatcttcttttcaaactctacagtatgtttgcatgaatttccggtggtccagcgcacagagcaaatgcatgggtacgtgttgcataaggagaggatctattctctgctgtctgcagaccattgcgccatgaatgcagcaacctctactgttgcttgacacgactgcgcaaagtccttgaacgagagggtctcgttctcgccgtagagagccttggtcatatcttcgaagaacgctagacgtgggagctcgtcagttggggctgcaacaacacgcagcaacttcgcagtcccgacgacgactgtgcggaacagcaacattgcttcgtccgccaccagcaaccccctgcgatgcgtggacacgttgaacaactcaaacatcgctgtaggcataggcaataatgacgaagtcaatcggtctgcaaaccaacgctacggaaaagtgcagcaccttttagcttggcatccagagaaagctgcggcgccaccaggatgagagctgcaaagagctcgcacgagtccacagcgctgcagttcttgacgtcaaagacagcaaacacctgctcgattgtattcctcgcaattgtggggaacaacgtgttgagctcgttcacccctacacaaaacttgcgctgggacagcaaggtaaaccgttgcagcgtttgctcgttaactgcaaggaaatcgtacgaacatcatcaaccagcgggacagcatgactacattatactgtaatgcatcgcacttgttcgtgccacctccagcactacttgggcattcggcgaggatgaactgaccaagagcgtgctggcgctggggctgctaaccgctgcacccatgctaagatgcgcttgaatagtcgcggctgtttatctgctcaggtagtctagcgccggaaaagtctacaggacgcgagtctgtatccgactcggaaccaactgaaatgctgggctgacgaagcacttgcagttgcatctgaagcatggacatgtaagaggttagatatcaagaagagagaccgggttcggaggccaaccacagcggggaaacgtacttgacaccgatccagttccacgagccaagtttggccttacaggacggacagagcagcttgccgtcattatttctgacgaaagacggttccggagtcatccactgcatcggctctacaaaaataccagcgcaagctccttcagcggtgtctgagcatgagtgagataactacaaaacggggtttgtcaggctcaaactcaatcgctaaaacgagagacatcaagtgttaatcctctgcgtacctgattccgtgtcgttgccaacacgtaattgcacttcctgcagcacaacgagctgcccggacgtgtgagctgcggcgtaccaaccacatcgggagttcccgtcttcatccgctgtcgtcgcgccaccatcgtgcgcagctcagcgtgtgcaggggtggcgcccatgatattcgggtcgttctccatcctctgaaagagctccagctgccgcaagaagcccgggttgatcgagatgcacggccgagctgtctgcaccacgtcgtacgcctccagcagcgtcagaccctgcatcgccatcaggtacgccacgcagatagaagcgctgcgcgactggccgtacacgcagtgcaccagcacagccgtcggcgtctcccgcatcaagtgcttcttgaggaactcgatgcactcgtcgaagtgcggcagtagcaactcctcctccatgtccaggatgtcaatgagcagcgcgtcgcacggctgtacagatatcgacactgcattagagccgccacaaagacaataactattattggacgttgctgctaccttttcaatgaggttaccggtgcccaatgcgatgaccgcctggacgccattggcctcgaggaacgccgcgtcctgggcagctccagcttcgccgaggaacaaggggagatcgctgatgcgcgccgccttcggaaacccttccagcagcgggtggtggcgctggcgctccagcagcagcctcacgactggcagctccgcttgcggcatggcttgcttcgcgttgtctcactgagtcacttagcgtcctgcgtaatttcatgccatgcatcttccgaggcgcgctgcgtttctctgcaaaaaaaacgatccttgaagctgggccagtatccaagcgttgataccttgggcccatactgaggctaagtgagccactggtcccgacccgcttgtcgcctcattttcaactgccaagtgctacgtcattcctgaatttgcctcgcaagcacaaggtcttcttcccccacacatccacatccccagtccgccatgaagatcgccttcttctccacgcacagctacgacatcgagtcgatggagcgcgtcgccaaggaggacggcgtcacccccaagcacgagctcaagttcctcaccccgcgtctggacgccacgtccgccaagctggccgagggctgcgagggcgtctgcatcttcgtcaacgacgtggccgacgaggccgctctgcgcgtgctggccgccggcggcaccaaggtcatgttcctgcgctgcgccggcttcgacatgatcgacctcaaggtggccaaggagctgggcatgcccgtcatccgcgtgccggcctactcgccgtacgccgtggccgagcacgccgccacgctcatgatgacgctgaaccgcaagatccaccgctcgtacaaccgcacgcgcgagcagaacttccgcctcgcgggtctgctcggcttcgacctgcacggcaagaccatcggcgttgtgggcacgggcaagattggcgcgctctttgcgcgtatcgctgccggtttcggctgcaaggtgctgggctacgacgtagtgcagaacccggaggcgctgagctacggcgtcgagtacgtcagccaggacgagatctgggcccgttcggacattatttcgctgcactgcccgctgttcccgtcgaccaagcacacgatcaacgccgagagcatcgccaagatgaaggacggtgtgatgctgatcaacacgagccggggcggcctgatcgacaccaatgctctggtggccggcctcaagagcggcaagatctctgctgtgggtctcgacgtgttcgagggcgagggcgactacttctactcggaccgctcgggcgctatcattgccgacgagactctggctcgcctgttcacgttcccgaacgtgatcattaccggccaccaggccttcttcaccaaggaggctctggacaacattggccacacgacgatggccaacatcaaggcgtacgatgccaaggaggagctggtgaacgaggtcaagtgaagtacgccgccatcagttcgaagtcggctgtgactctaaagcactactgtacgaagcagatttcgttttcttgctccgatttcaatttttctagtcgtcgaattagtctgaaaagttactaaaacggaaatgcaatgttcctctttgtaatgcaacgtgaattttgcatctttcgagtgagacgagaccgcttggtgctgtcgttgaagtcgttgaagttttggctcggtacctcgaggccatgatggatgagaaccaacgaagcagcggcgaggtgggtaacacgttgcagtatgagaaggtggggcagcgatgctaccaagaaatgcggctctgaagtagtatgggaccgtcgtctccccctcggatccacctaactatcgggcggccagagcgatctctcattccttgtttcgccaagaaccccacaagctattcgccaacgaccaagcaaactccaagtaactcgacgccatgcagaacgcccaaaagtccatcgagatcgccttcttttcgtcgcacagctacgacatcgagtcgatgaagcaaatcgccaaggaggacggcgtcactccgaagcatgaaatcaaattcttcgctccacggctggatgccgactctgcgaagctggccgagggctgcgagggcgtctgcatcttcgtcaacgatgtcgccaatgaggccgccctgcgtgtcctccatgctggtggcactcgcgtggtattcctgcgatgtgctggcttcgatatgatcgacctcaaggtcgccaaggagttgggcatacccgtcatccgcgtgccggcctactcaccgtacgctgtagcggagcacgccgcgtcgctgatgatggcgctaaaccgcaagatccaccgctcgttcaaccgcacgcgtgagctgaacttccgcctggcaggtctgctgggctttgatgtccatggcaagaccatcggtgtcgtcggaactggcaagatcggcgccctgttcgctcacattgccgccggctttggcgccaaggtgctgggctacgacgtggtgcagaacccggaggctttgagctacggtgtcgagtacgtgtcgttggatgaaatctgggctcgctcggacatcatctcgctgcacgtccctctgttcccaagcaccaaacacgtgatcaacgccgagagcatcgccaagatgaagcccggcgtgatgctcatcaacacgagtcgtggcggcttgatcgacacgagggctttggtgaacgggctggagtcgaagaaaatcggcgcggttggcctcgacgtcttcgaaggggaaggtgagtacttctactcggaccactcggggaccatcattgccgacgacgatctcgcccggttgttcacgttcccgaacgtgatcatcacgggccaccaggctttcttcacgaaagaggcgctggacaacatcgcgcgcacgacgatgagcaacatcaaggcgtacgtgaggaaggagccactggtgaacgaggtcaagtgaagcgtggctttatgataagcggtgcaaagttggacacgaaccaagcagcgggtgatgaacagtgcaaggcggcggattgaactgttgagacagtaaatacatgtagttagctctgcacccgaagaaactactgtacctttagttctggttatgatcattggtcatggcgaagatgaaggcaccgcttccgatcatgatgtcttgttcgctctgctttcagaggcgatttcgccaagactggatgaggcacacttttgccgcaaaacttttacttggacaacttcacgcggccgagcggcgcgaataataatatttacccataaaatatgttcatcacgcagtctccggcagcggcggtaacgctgccactgctgctgctcgttcggtcgtgggggttgtggtggaggatgtgggcgacgacttgatgagctcggccgccttatagtcccgcatgctctgcgactccgtgtactggatggacttttcgtggttgtacgtgcgcgtgacctggtggatgtccggcggcgtgtatgcctcggcctcgccctcgcacgccacgaactccactcgggccgcgtcgccgcgcatgctcacgtccagcagcaggccgtcgtctcgtgcgcccacgtaccttcggtgctggttcatgctcctgaggtagcccaaggttgagtactcccaggtgagcccggacttgccgcgcacgcacatgggctccttcatgcgcaggtcgcggaagcagctgaacgtcgagcggctgaacatatagcagcccgactcttcgtggaagaagcgcacgcggatgctgttgtagcccctggcgtagcactcgaggcggaaggccgtgcggccgcacgtcgtggggtcgtctccctgcggcacgacccccacggtgctgtcggcccgcacctggacgtagtggttgcccttgacccggagaaagacccgcgagcccgagagcttgagcacgttgctcacgacggagcgcgagatggccttgatctcctcaacctgcttgacgagcgcgtccacgtcctccttggccaggcgcttctcgaacggcacgcggccccgcaccttggtgagcgtctgcttgcaccactgctcgccggtcatgcaccagtgcgccgcgtgctcgcagttctgcgtgaagatgttgaagtctccgcggcccaggcccagcaggaagcggcagcgcgagagcacgacctcgggcaggtcggccttgctcaggtgcacctcgccccagcgggacagcacctcgcgcaggccggacgtgtggtactcgaccaggcgcaggtgcttctgcttgcggttgtccaggaactcctcgagcgtcgagatgcggaagcacgagtcggcctgcgcctcctggaagccctcgagcgggctccacacgtggcacacgcggatgtcggcggccgaggcgcccgaggcccagacgatgccgtggtgctggtacgagagcggccagcgactgtagtcccagatgcacacgtggtcgccgggccgcagcgacgccacgttcagcacccgcgtgtacacgccgcccatgcctggctgtctgcctactgtagtgcggtactgtgtgcacccgtagggtagattaatggccgcggcgattagagagacactgagcgcactccggagcccggcgagcgtcgtgcagggaatgaggaagtgaccgattctgcggcactgctcgacggatggggcggtctgactcgggtgctgtgtggcgccactggcgcgcctgcaaacagcccaattccgcagaaaaaagccgtttgagtccgctatttcgcgataccaaccccttttacgaggcttgtttgggtactgtaccgactagatggtacaatgatccctacccttgagtccaaaacgaaccctcgttcccgccgtgctgagacacgagccgcatacaatcgccacacaatggcgcacactcatacagacttcaagctccaaggcgttgaggcgggggccggcaccagcgccagtacttgccgagtcttgctggttggtggtcgcggaccagctgccgtgtgcaatcctcgcgctgtcaaccgcagcctgcaccgcaggagacgcgggctccgctgacttcagttaccatttggctgggcgaggcccattttagccgcgaaaggccaaatcgcatgaagccgccagcgttttgttgctcgcgccgttgctcacgaatatccaggctgccgtgcagcatccaccgttgattatcgcgcttggttaattcgtcgacagagcctggtgctccggcgcacccgataactcattactgcaggataagtctagaagacgtgttgtacttgaatttcaagtcttgaaagaactgggggtgtgctgtaaaacttctaattgcgcccctggggtacattgatactgtagtacacccacactattaaggtactaataagcactgctcactcagcagcagaggttgcaaactcctggccgcacccggccgaacatgttcctcgtatgaattcggatagccgtggtgactgaggtaactggacgtggttgcccgtaatttttttccgggtatccgtaaatttgaatcggatcaactaatgaagctgctccaacctcattttcttcttagggaacgagccaaaccgatgctttcttgcgatcattcgatctatcttgtcctataaactgaaaataatagttcggtgacggtgattaaggagttctcgattatggctgtctccggatacccgaccgaagctataccacaatcccgtttggttgtccatgcatggttaaccacgggtacgggtaaacggctgaaaaatggacaccctattgcgacgtttgctcagcagtgcctcatatcccaattggatgtggcgttgtcgaaatgttgcttgtggtccgagcaactttttttggacgaacaagggtgcgttgaagtaggcggggagagttacttgaaacaatatatatatatataatataaagtacgttctgttgtattacagatagtggttacctcggttttaccatgctataattttcttcacgggaagactttggcagctcgttggcgggcggatgtgaagcaagcgccggataaactaataaatataatgccctctttggctactttactaatgttttgactaattgagtgaaaggagtgtgttggtggcccactccaaccaacaatcagtataccaagtatgtgagcttactctcagtacaacataggtggtattataagtattacctacttgttttcatgctgcaaatgacgagttctccatgcagttttatgataatagtgttcctaattgaagatgtgatgtcggaacggaagctgcactgatctgcacgtgatggcttagacccaattaatcagcagcttcattatatccattgagagagcggggacgtcggcccctaagcaacgcgactgagatgccccactagtagtagtaatacaactactactatccaaattctggcaatagtagaatgcatctagttgaccatcattccgaatatcgaccgcaatggcgcttactggcctagtatgagctgcaactgtaagcgcgcgttgcccgttctcatcctaagaggattcctcacgaaagaaccggtttagaacacgcttgccgacgagcattgttcaagcacgtgtaagttttcgcgaaccttcgcgaaccaacagcacatctaaatgtttcctgaaagcttctcaacactccaaacatgaatgttatgtttttttatctcgcacgatctccttgaataacattttattgcactcttcattattgcggtcggcgcattgcatgatcactttattttttttgcggttaccgccaatagcgctcggggcgagcactgcatcgaaccccgctgaccgggccgctccattgtgaggtacttaagttagagtaaagtgatgacttctgagtaacttcacgaaaggcatctggttggctttggaaaaatgccgtgcccagtatggaagcctagaaggaacaggaggagagcacagcgcaagtatgcatgaggagaagaccatcggcataaatatcccaacgtgaagaggttaataggaaatttaagcgccatcaagtcgaagacaatactctaaactgcttgaaacacgcctttcacttcgtttgtgccagctaaacagccagcaccatacgtgatggatgtcgcttcaattttttacagccaactaactccaaaataaataatgtactcaaaagtagagcttactctgactgaaataacacctcaatagtagcccctcgtagtcactatcaagaagtttgtatggaaatagcccgaaccctataatgattttcggccgccttgagacgttgtttcggtccgaggaagtcgaatctctgtattaggactttgtatgggctcgtcatcggaagcaacttctttttggtgaaacaacatttggcagttattctgtgttaattggccaatgatcgaccaccttgggtaaaaaaaggtagtcgacaaaattttgtggagaattttagatttgatttttttctgaggactatggtgaattttgaagtgggatcataccaaaaagtacgagttcatacaagaatctacgagttaataccgaacagtacgagttcatacgaaaatgtacgagttcatactaaaaaatacgacttcataccaaaaggtacgatgtgtgtgtacaataaagtacgacctggtcggctcctcgccacgtgttcactttcaaatcgagcacactttgcggtgcttggccatgttcgacttcgccacgagcttagggctcccattcaggattcctcgatgcttagtggtcaatactatttttgactgatctcgcatatgattggctgaaataaaatgttatttggcgttatttcagggaaagaagttgaagtactttactcttactcagaagtgaggataatgtactcaggagtaaggacgatccttaaatgtacagctgggtgtgggctcctgggagtcggtgtcttcgcgttaatgtccttggtaacgcatgtgcggctgcgaaagctgcatgtcgaattgcccagtgcaatcgaagctaccaagacaaccacgaacagcagcgatacctttgagataatgttcgtgcattagtgcatttttcacactgcacgttgctgcgtacctgtcggtacacaacacggatacgtctccgatattgcgctttggtggcaatcgctcttcgctcactcacgtttacgtgagattggattatttgaagttcgaggcgaattactgagcagatggagccaaatgcaaaagggtttacaccagcacctccaatccaagcctacgcatccataaacgtgttagatttaacaagggcctatttgaaaatgaatacaagtaccctgtcgagttcgacgaaattatctaccaatgctctcattgcgagcttcgtacttgtctgtcggagcatgaccaccgccgacaagcaagttcaacatcgaagccacaacaggtcctgctgtattgaacaggagtcacgatgaaccacttgttggaagaaagttgctgtagacacatttacacgtgcagcttcaatcagggactgacttgaatcaaggcgggcgtcgagagcttaaccaacgacctctttcaaagtctaccagtcatagtgaaagcataaaagcccgctagcaagtatcctgagccgtccataataataataataagccgccaagaacgcattggagtcgtgctgtattgcaggcaaaggcaacgcctgatgccagcctctcgctgaagttgaagcgcacgggtagcagagacgggctgcttggcatcagccggatagacacgcacagcgaggtacgacgttgacgtatcttcagtcgcgtagctttgcccatgcggtagcttcttcatctcgctcattagcgaaaagtccaagcaccaaggaaagctccgttccaaaaccaaagacagcatgctgtcgcgctgtgcagcctctttcggccgtcgccagggcctctcgatggcgcgccgatggctacccgccctcgctcagcgcgagttcgccagcgcaaccccgcgcaaaggcatgcgcatcggcttcttctcagcgcacaactacgagatcgacgccatcaaggcgctggccagcaacgccggcatcatcaaggacaacgagcttgtgtacgtcaataaccaaaggggagagaggcatacggtcgctcaaagactgatgtattgctttgccccattgcagtttcttctcgaatcgacttacgcagcagaccacgcagctggccgagaactgcgagggcgtctgcatcttcgttaacgatgtcgcagacgccactgcactgcgtcgggtaggtctttccttaccgaggtcgctgtcattgatttcacgccctgcgctaaccgctgcgcctgctcattctactatcctctgtagttacacgaccgtggcactcgcgtgttattcctgcgttgcgccggcttcgatatggtggacttggaagcggccaaggagctcaacatgcccgtagtgcatgtgcccgcgtactccccgtatgctgttgctgaacacgccgcggcacttatgatgacgctgaatcgcaagacgcatcgcgccttcaaccgcacacgtgagcagaatttccgactaacgggcctgctgggcttcgacatgaacggcaagacggtcggtatcatcggcacgggcaagatcggcgccatctttgcgcgcatttgcaaaggctttggctgccgagtgctggcaaacgacgtggccgagaacccggaggcgctgagctatggcgtcgagtacgtgccactggaggagatctggagggaggcggacatcatctcgctgcactgcccactgtttccgagcaccaagtacgtgatcaacgagaacagcatcaagcagatgaaggacggtgtgatgatcatcaacacgagccgaggagcgctgatcaacacggacgctctcgtggagggcatcaagtcgaacaaaatctcggctgccggtctggacgtgtttgagggcgagcagggctacttttactcggaccgctcgggtgaaatcatcgccaacgacatgctggcacgcctgttcactttcccgaacgtgatcatcacgggccaccaagcattcttcacggaagaggccctggacaacattgcacgcatgacgatagcgaacattgcagcgtacattgccaacgagccgctggtgaacgaggtcaagtgacttaggaggggctgtatacagcattgagtagccatttgcgtgtcatattacgtgcatatctaacacggtaacctcagaataaacgacgtcaaattgctgggtgtgcacgcgttgtatgacatcgatatcacacttggaggaggctggcacttacagtgtaaccttatcttgctaacttgcgtcgaaatctgaagcaacttcgacatgcccttctttgtattggccacaataaacgtcttgattacactacggtcctatcccatacttgccatgaaagaaaatcactgccattcccgttcaaatgtgtgtgtgtggagagagagagagagcgttcggatgaacgacacagtacacgtcgcaagagctgaagccattatgagttcagccgactcctcgttcgtctgcagactggagttcgtgctggaggcttcgccagtcacgcttgggcactatgcgctgacgctctggtcccttggccgcctctgtctttgtctcgcaggtcacaaccggtgtaccgcgccctgcatccaatccaagtgttaacgcgctcgaagccgtgtttcacacgcggcgccgcctctgtgcgtactgctgcgcagagagcgcggctgcatactcgccgctgggacagtctatcgaagtccagtgtatacgtgcctgcccacgtccaattttaatctagcgcgcaagacgagctgcatttttatttgcaggtacagcattcagcggcaagccgcccgccaaggccttcttcggtcgccaagttggcgcgcgttttaacatgctcggcgcagggcgagcgtcgcgctgcaagggacacgcagcagtgctgcttggcgcgacatgcctcataagtgattgtccagacgtatttggccaagtatgagctttactttctgcggtgcacagtacttggtcgtttcaaaaaggtccaccaccacaccaagcagaaacgcaaagaagcgcgcagctgccatctgtcctcacggtgtctgcaggatcgggctttctcaaggtttggctacctcgcacgcaccttgctctctcagggcggcgcggtgagatgttgacgttcctattacgctcaaggaccgagaagattcggcctcaccgctccagtgcagcgcgtcggagctcattcttcttttcaccaagaacaccacaccaccaccatcaccacaaccaccaccatgcagatcgccttcttctcgtcgcacagctacgacatcgagtcgatggagcgcatcgccaaggagcagggcatcacccccgcccacgagctcaagttcttcgccccgcgcctggacgccacgtccgccaagctggccgagggctgcgagggcgtctgcatcttcgtcaacgacgtggctgacgaggccgctctacgcgtgctggccgccggcggcaccaaagccatgttcctgcgctgcgccggcttcgacatgatcgacctgaaggtcgccaaggagctcggcctggccgtcacccgcgtgccggcctactcgccgtacgccgtggccgagcacgccgcgtcgctcatgatgacgctgaaccgcaagatccaccgttcgtacaaccgcacgcgcgagcagaacttccgtctgtccggcctcctgggcttcgatgtgcacggcaagaccatcggcgtcgtgggcacgggcaagatcggcgccctgttcgctcgcatcgccgccggcttcggcgccaaggtgctgggctacgacgtggtgcagaacccggaggcgctgagctacggcgtcgagtacgtgtcgctggacgagatgtgggcccgcgccgacatcatctcgctgcactgcccgctgttcccgtcgaccaagcacacgatcaacgccgagagcatcgccaagatgaaggacggcgttgtcatcatcaacacgagccgcggcggcctgatcgacaccaaggcgctggtggccggcctcaagagcggcaagatcggctcggtcggtctcgacgtgttcgagggcgagggcgagtacttctactcggaccgctcgggcgccgtcattggcgacgagaccctggcccgcctgttcacgttcccgaacgtgctgatcaccggccaccaggccttcttcaccaaggaggccctggacaacatcgctctgacgaccttcgccaacgtgaaggcgtacgtcgccaaggagactctggtgaacgaggtcaagtaaaccaatgacttcgattcgatagccggatacccctcgtcgtatctatcataaatgcacatttcagttttgcctagacgttgactgctctttggttcacagtaagatacttacagcaaaaactgcctgctgggtaagggaacgaagcgagatgagcggaggagcatggcactgatcttactatcagcttctgcttctgttgggaggtactagatataatactagtacatctttggaccataacgagtattttattgcagaggccgatcgcgtcaagttgttgtgcttccagtaaattcgatccgtatgattcgagttgaatccatcgtacatgtagcgaatcgactcaagatcgagccgctatactattactattttcatagcctatgcgtcacgtgtatcctatccgtatcgggacatcggtgacggagacatagctttgccttgacaagcatttatcgatgttttcctcttgaccacgacagctgcaggctagtctctacatccttcttatgccgttgcttcagcttccatccatgctggagcaactggtatccataggatacaacaccatgtgcaaaggttacggccacggtactgtatgcagaacaacgacaacgacaacaacaacaaaattcgctgttcgcgtctgttggtagcataggtcaggggtagcgacggacgctcgccctttagtactaatgtttgtatgcggtatgttgaagttgcaatgttgcactgtgcgcctcgcacacaatgactttattcggccgggacccaaagggcatgcatgtaagtagcgaacgctggtatgtctgcggtgtgaactagttagctcactattcccgcaattgggtgtcctctggggaactgcagggtgttctaccatgacgatgatacatacagtagctctttgtgcgtttgccgcaaactctacgctgacaggatggtcaacaatgtcaagactgtcaagactgtcgacgccacatgtgactgggatacagatcctgtcctgtatgaagggagggccataccctcgcgtctatccgctggggcgggcccacagccagcgcagagggccagaccctttccacagcaaccggactggccccgacctactgtatccaatgggtgttgacgtccgtttagctaggctgcttcctgagtcggccatggtgctgctgcggccactcttcattctacaactcgctccgtcgagcacaaagcactggggccaggccgtgacgagcgacctctctattcggatcaagctttcgcccacaacaacaagaacaactaccagacaaccatgttcagcagcagcaagatcttcgcgatgtgcatcgccgccgtcgccgtgtgcagcggggtgcaggccgagcaagaggcggccgaggtggccgagacgttcggtctgctgggcctcggtctgctgggccacggcgtcggcgtcggcgtcggagtcggagttccgggtgtggccagcgtgggcgtcggcggctatggtccgggtgtcgtgagcccgggtgtgagcgtgggcgtgccgggcgtggcgagcgtcggggtcggcctcccgggtgtcggtgtcgcgccctccgtcggcgttggcgctcctgcaggggttaccgtcggcgcgccggcgaccgccgtgaccgacggaggcgcctatgcaccagccactgcgactgccaacgcgggcgcgcctgccgctgccaatgcgaacgttaacgcgggctctcctcctgccagcaacggaaacgcggttgccaatgccaacgcgggctctcctcctgcctccaacggaaacgcggttgccaatgcgaatgccggctcgccccccagctcggttagcactgcgaacgccaacgccggtgcgcctcccagctcagttagcactgcgaacgcgaacgccaatgctggatcaccgcccagcgccgttagcactgcgaatgccaacgcgaacgctggccccggcggtagcggtggcccgggcaggacgaccacgaccacggtgaccagcaacgatggcaccacgtctgcgtccacttcgaagactgtcagcaagtacgactgcgaccgcgaatgcaaagggtggtgcgagcgttggcccgggcccaagcagcggcagcccgagcggtggtagcccgagcgatggaccgagtggcagtccgagcggcggcaagacgggaaccggcgctgccaacgcggcggcgcagaaggcttaccgcaagctccgctcggtcgaataagcggtctcacggtagcgagggcacgcgcaagttgaggcgcgtataactgtttatgagtgttagtcgtcgttcgcatggaaataaaagtgctgtgatcctgtatgccgtcgagtgttgtgatcagtcttcttaggtcaataggcttatcattgtccaccttttgatcaagtagtgggttttggtggccttggtggttagagcaacgttgtgtggtgcatgtcctgcagattgacctggaaaccgaagttgaataatatagcaggacgtttacgatggattgaaaagcgctaattatcgtttgttgtcgctctagtagcacccaaccacgagatcccagttgccagcggtgttgccgcaccgcagcaccgactgtgaacacagcaccactgacggcacctgcgcctataagaatatacgcgaatatatatatatatagcaggacatgcaccacacaacgttgctctaaccaccaaggccaccaaaacccactacttgatcaaaaggtggacaatgataagcctattgacctaagaagactgatcacaacactcgacggcatacaggatcacagcacttttatttccatgcgaacgacgactaacactcataaacagttatacgcgcctcaacttgcgcgtgccctcgctaccgtgagaccgcttattcgaccgagcggagcttgcggtaagccttctgcgccgccgcgttggcagcgccggttcccgtcttgccgccgctcggactgccactcggtccatcgctcgggctaccaccgctcgggctgccgctgcttgggcccgggccaacgctcgcaccaccctttgcattcgcggtcgcagtcgtacttgtcgaagtactgctgacagtcttcgaagtggacgcagacgtggtgccatcgttgctggtcaccgtggtcgtggtcgtcctgcccgggccaccgctaccgccggggccagcgttcgcgttggcattcgcagtgctaacggcgctgggcggtgatccagcattggcgttcgcgttcgcagtgctaactgagctgggaggcgcaccggcgttggcgttcgcagtgctaaccgagctgggaggcgagccggcattcgcattggcaaccgcgtttccgttggaggcaggaggagagcccgcgttggcattggcaaccgcgtttccgttgctggcaggaggagagcccgcgttaacgttcgcattggcagcggcaggcgcgcccgcgttggcagtcgcagtggctggtgcataggcgcctccgtcggtcacggcggtcgccggcgcgccgacggtaacccctgcaggagcgccaacgccgacggagggcgcgacaccgacacccgggaggccgaccccgacgctcgccacgcccggcacgcccacgctcacacccgggctcacgacacccggaccatagccgccgacgcccacgctggccacacccggaactccgactccgacgccgacgccgacgccgtggcccagcagaccgaggcccagcagaccgaacgtctcggccacctcggccgcctcttgctcggcctgcaccccgctgcacacggcgacggcggcgatgcacatcgcgaagatcttgctgctgctgaacatggttgtctggtagttgttcttgttgttgtgggcgaaagcttgatccgaatagagaggtcgctcgtcacggcctggccccagtgctttgtgctcgacggagcgagttgtagaatgaagagtggccgcagcagcaccatggccgactcaggaagcagcctagctaaacggacgtcaacacccattggatacagtaggtcggggccagtccggttgctgtggaaagggtctggccctctgcgctggctgtgggcccgccccagcggatagacgcgagggtatggccctcccttcatacaggacaggatctgtatcccagtcacatgtggcgtcgacagtcttgacagtcttgacattgttgaccatcctgtcagcgtagagtttgcggcaaacgcacaaagagctactgtatgtatcatcgtcatggtagaacaccctgcagttccccagaggacacccaattgcgggaatagtgagctaactagttcacaccgcagacataccagcgttcgctacttacatgcatgccctttgggtcccggctgaataaagtcattgtgtgcgaggcgcacagtgcaacattgcaacttcaacataccgcatacaaacattagtactaaagggcgagcgtccgtcgctacccctgacctatgctaccaacagacgcgaacagcgaattttgttgttgttgtcgttgtcgttgttctgcatacagtaccgtggccgtaacctttgcacatggtgttgtatcctatggataccagttgctccagcatggatggaagctgaagcaacggcataagaaggatgtagagactagcctgcagctgtcgtggtcaagaggaaaacatcgataaatgcttgtcaaggcaaagctatgtctccgtcaccgatgtcccgatacggataggatacacgtgacgcataggctatgaaaatagtaatagtatagcggctcgatcttgagtcgattcgctacatgtacgatggattcaactcgaatcatacggatcgaatttactggaagcacaacaacttgacgcgatcggcctctgcaataaaatactcgttatggtccaaagatgtactagtattatatctagtacctcccaacagaagcagaagctgatagtaagatcagtgccatgctcctccgctcatctcgcttcgttcccttacccagcaggcagtttttgctgtaagtatcttactgtgaaccaaagagcagtcaacgtctaggcaaaactgaaatgtgcatttatgatagatacgacgaggggtatccggctatcgaatcgaagtcattggtttacttgacctcgttcaccagagtctccttggcgacgtacgccttcacgttggcgaaggtcgtcagagcgatgttgtccagggcctccttggtgaagaaggcctggtggccggtgatcagcacgttcgggaacgtgaacaggcgggccagggtctcgtcgccaatgacggcgcccgagcggtccgagtagaagtactcgccctcgccctcgaacacgtcgagaccgaccgagccgatcttgccgctcttgaggccggccaccagcgccttggtgtcgatcaggccgccgcggctcgtgttgatgatgacaacgccgtccttcatcttggcgatgctctcggcgttgatcgtgtgcttggtcgacgggaacagcgggcagtgcagcgagatgatgtcggcgcgggcccacatctcgtccagcgacacgtactcgacgccgtagctcagcgcctccgggttctgcaccacgtcgtagcccagcaccttggcgccgaagccggcggcgatgcgagcgaacagggcgccgatcttgcccgtgcccacgacgccgatggtcttgccgtgcacatcgaagcccaggaggccggacagacggaagttctgctcgcgcgtgcggttgtacgaacggtggatcttgcggttcagcgtcatcatgagcgacgcggcgtgctcggccacggcgtacggcgagtaggccggcacgcgggtgacggccaggccgagctccttggcgaccttcaggtcgatcatgtcgaagccggcgcagcgcaggaacatggctttggtgccgccggcggccagcacgcgtagagcggcctcgtcagccacgtcgttgacgaagatgcagacgccctcgcagccctcggccagcttggcggacgtggcgtccaggcgcggggcgaagaacttgagctcgtgggcgggggtgatgccctgctccttggcgatgcgctccatcgactcgatgtcgtagctgtgcgacgagaagaaggcgatctgcatggtggtggttgtggtggtggtggtggtgtggtgttcttggtgaaaagaagaatgagctccgacgcgctgcactggagcggcgaggccattgtctaggcggtcgtcgatctcgcttactcggtgctgcgacagacagtcatgcctgcttcatttttaatcactttcctcttggcttgcttgtcttggcgctgcgtgtctttagattggcccggcctgccatttaacatgctcttcgcattgcgagcttcgagcaagcaagaccgtcttgccaagacgtcgagttctgcttggcacaagtgaatgtccattcgtcctctcctattggacccaatatggtccaaatgctaggcggtacttctgcagactacggtacgctttcgtaccaagaaaggtccaccgcgacaccaagcagcgtcagaattgcagagaaacgcgccatctcaaggtttggctacctcgtacgcacctcgctctccgagcaagcaggacgcgggaccaagcaccaagactcggcctcgccgctccagtgcagcgcgtcggagctcattcttcttttcaccaagaacaccacaccaccaccaccaccacaaccaccaccatgcagatcgccttcttctcgtcgcacagctacgacatcgagtcgatggagcgcatcgccaaggagcagggcatcacccccgcccacgagctcaagttcttcgccccgcgcctggacgccacgtccgccaagctggccgagggctgcgagggcgtctgcatcttcgtcaacgacgtggctgacgaggccgctctacgcgtgctggccgccggcggcaccaaagccatgttcctgcgctgcgccggcttcgacatgatcgacctgaaggtcgccaaggagctcggcctggccgtcacccgcgtgccggcctactcgccgtacgccgtggccgagcacgccgcgtcgctcatgatgacgctgaaccgcaagatccaccgttcgtacaaccgcacgcgcgagcagaacttccgtctgtccggcctcctgggcttcgatgtgcacggcaagaccatcggcgtcgtgggcacgggcaagatcggcaccctgttcgctcgcatcgccgccggcttcggcgccaaggtgctgggctacgacgtggtgcagaacccggaggcgctgagctacggcgtcgagtacgtgtcgctggacgagatgtgggcccgcgccgacatcatctcgctgcactgcccgctgttcccgtcgaccaagcacacgatcaacgccgagagcatcgccaagatgaaggacggcgttgtcatcatcaacacgagccgcggcggcctgatcgacaccaaggcgctggtggccggcctcaagagcggcaagatcggctcggtcggtctcgacgtgttcgagggcgagggcgagtacttctactcggaccgctcgggcgccgtcattggcgacgagaccctggcccgcctgttcacgttcccgaacgtgctgatcaccggccaccaggccttcttcaccaaggaggccctggacaacatcgctctgacgaccttcgccaacgtgaaggcgtacgtcgccaaggagactctggtgaacgaggtcaagtaaaccaatgacttcgattcgatagccggatacccctcgtcgtatctatcataaatgcacattccagtttgacttgcatatcgatttcttgcttgtgttctgtgcacatgctactttgggttgtactacaacttgtaggcgtggaaatcatttgttggtagcagtcgcgttcaccgttaccgttgacgaacgagccaaggtttcagccacaacaacttgcagcttcaggtaattaatcgacgagttgttgttgaggctgccaaggactacatccgggtgttgtctgcaaataaacgaaacacgcgtagctggcaatcgtcgccgttcccgaatccggctcacccttcgttgttaagcttataacaaaagacaaatgacagggatactgtcacttgcactgccagtgatacaaattccccagtgcgcgatagatcagttatcatgcagttgatattcaagcctggtcgccttgtacttcgacgggggaactcgcatcttagcgagaggacgaggcaccgaaaaatacgcgatgaagttgactaccaggcgtgcaagtatctagcacacccggccatcgtcaccagactggtcttgatggcactcggcagcaatgtaagaaatcaagcaccagtgaatacatacccacttgcagtctcggtctactgaacatgcacggagcctgtggtggaatcctcacctgcgaagtggccgccgcatgtttatcggcgtatccgagctgcaacggtgacaccttcgcgaaagtctttgtccaaaatccttattgtcttgtctctattatagtttacatgttgaagtgaacgacttttgcggctgacggtcatcgccagtgggccgtttcaagtcagccgttgcttgggcggatcgcaaaaacacgcacttgcgatcctcgcccaacagccgcatagccgtactgtgagaggcctcgtggctttgatgcgcacgcgcactcgccccggcggcaatggcgaggagcgtctcattctcgcttttgccaagacccgagcaagccccgccaagccctcccaagcctcgcaccatgaagatcgccttcttctccacgcacagctacgacatcgagtcgatggagcgcatcgccaaggaggacggcgtctctccccagcacgagatcaccttcctggtgcctcgactcgaccacacctccgccaagctcgctgagggctgcgaaggtgtctgcatcttcgtcaacgacgtcgccgacgagcagtcgctgcgcgcgctgcacgctggcggcacccgcgccgtgttcctgcgctgcgccggcttcgacatgatcgacctcaaggtggccaaggagcttggcatgtcagtgacgcgcgtgccggcctactcgccgtacgctgtggccgagcatgctgccgccctgatgatgacgctgaaccgcaagatccaccgctcgtacaaccgcacgcgcgagcagaacttccgccttgccgggcttctgggcttcgatgtgaacggcaagaccatcggcgttgtgggcacgggcaagattggggccctgttcgctcgcatcgctggcggcttcggtgccaaggtccttgcgtacgacgtgatgcagagcccggaggctcttagctacggcgtcgagtacgtcagccaggacgagatctgggctcgctccgacatcatctcgctgcacgcgcctctcttccccaccaccaagcacatgatcaacgccgacagcattgccaggatgaaggacggtgtcaccatcatcaacacgagccgtggcggtctaatcgacaccaaggcgctggttgacgggctcaagagcggcaaaatcagggccgtcggtctcgatgtgtttgaaggtgagggcgagtacttctactcagactgctctggtggaatcatcgcggatgagaccctggctcgcctgtttactttcccgaacgtgatcattaccggccaccaggcattcttcaccaaggaagccctggacaacatcggccacaccacgatggccaacatcaaggcgtacgtggccaaggagccgctagtcaacgaggtcaagtaaaattcgccttgaggttgaaactgactattggccccgcgctcatggctggctcagtgtgtagccttcttgcatcgagttccgttcatcccgcttcctcaaggacttaatacatgaaatttctgcgtttatcattgagcgttgagcattgcggaagctagggagtcgcctatggccaccatctttgccactggaacaggtccaatgcacagcgaaacgaactggacgggacctcgaacatgctgcagaaatgtcaagctctacgagtctagttagggaccataccatcaacgtcaggctatactgctgctgcttggcgtacctcgtcctcttgctttaagtccaagggccgagtcgcagcattttcggttgtaaactgacgatgcgcggcaaaccgacagagttctcgccaccagaagttcctcgacaagcccttcgcggcaaaagggagcttcagcctagctacttcgccctttatcaccgtctcccaagcaggattgaggtaagccaccgttctgcaggacggcgaaggtgtgtctccgaggcgagaagcatacgcactaggcgtggcagattaatggcatgcatggattagacttgcatcgtgagagcaggaagcagcttccactaagaacgtaccaaaccagattatcaggaataccttctagagagcgatttccctctcttacgcgagctttagatcggtaaggcagcaacttatctgcctgcagtagtgaaaacaacgtaagccccccccccactcattcgcacaaataggaccacccccatacgaaccgcatcgcggagcgccttgtcttctccagcgttgcctctaaaaatgccgatgaaggtgatcaacgggcctctagagctgttacgaatcaccaccttgacgtccgcttgggtccgtttgaggtagactcgaccaatgtggtgcgtgtagttgctctcccttcgcccaacacactcccccagcacagtcaaaagcaccagctctcttgaatcaagtatcttcgatccttctggccggaagtattcacccacgagttcgccgttctcgagccacgcgccttgtatcaaaccatcgcttttgtcgatatcaatgccatctagctgtcgatacgccactacatctcgcacagggcgtccagaaacgaagcgagggtctacatcaaactgcttgactatagcgtccagtatttccacttgctttgagatggctgcgcgaagcttggacgcgtcccactcgcgcaagttgcgccgcccgataagcagcaaaagagcgtcgaaaaccgtacgcaacatacgtcgaaccattaccctgctagacggacagtcattgcaaggcttatctgacgcaataaccagcaacatatcgatcggtgtcatctcatagacgacggagcggtgcttagtctcgagtgctagcagctgcaagtcgacggccgagccgttctcgcgtcttgctgcgtgatacagcgcgctcattacgcccaccgccgcgctaggaggtgcttgaacgtcgccataccgtcgaaccagcagcgggatgccgtcgccactcacgagcagcaacagcgcgttcggcggcggcgtctcctccggatccacctgcatcgcttcaagatatggctacagttgtgtgtgaaagtcaggtcgactgtgtggtccacctggataggtacactgtaccagccagcacagtgctttgaatggccattgcaccaagttgaccaccagcaagagcaagtggagaccgacgagtgtagccaagtagcgaccatgagcacgcagcgcggcaacgtcaagaagcgcgcgcccaagcaccagaacgccttcgcgttcaagcacaaccccaagtccaagaagacggagcgcatcatgtccatgcccatccacggcctctgcgagaagtgccgcaagcagatcgagtggcgcaagaagtaccgcaagtacaagccgctcacgcagcccggctcctggtacgccgcaccgcactgcactgggttgcactgctcttcgtattgcacatactaattcattgctgtcctctgtgttttggctgcagcatctactgccaccagaagaccgtgacttccgcctatcacgcgtcctgtgacccttgtgccaaggtaggaagacaattgcaactagcactgtcggtactgcgatgcactgaccattgcggggtgatttttactgcaggagcgagacatttgtgccaagtgctgtttgtccaaggagatcgtcgcaaggtgcgtttggctgttgtgcatcctgtctcccagtggcagttgatgtgcttgttgcaatgcagcactgtactgacatggactcgcgtggctattgttgccgttgctgttgccattgcagtgagcaagagttgttggcggagcacgagaagaaggagcgcgagttcgagaaccagctggagggcatgcgcgagcgcgaccgtcgcgcgtatttgcgcaagctggagaaggagaaggaggcaatcaccaacggagaaggcgccggtggtgctgaaggcaacggctacgagtcctacgacgaagaagacgacgagggcatgcagtgataggcatcaggtccaagttgcatcctccaggaggacagtttttgaccaataaaacattttttttacatgctcatttttcattttcgctccgacatcatggtgtcgcagtcgacgcaggaggcgtgggaccactggtggcacgagaccaagagcggccgcatcagcacctacgtgtccatcgtgctcttcttcctctccacggtgctggccaaccccatcgcgcgctgcctcttctggagcgtgcgcaaggcctgccccaagaagtggatgtacgtccgtgtacatgtatagcagaattctgctgctgtccgcacaagtgtattaactctgcaattctgctctcactatacgatgttacgcagttggcccgatgacgcccggcggatgatgatgtggcagacgtcgctcgtgtgccgcgtggggctgctgtggatcgccatcctcgtgtcgcggctgtcgctgctgctgtacgagtggccggcctggatcttcggcgtctgcttcatcatctggatggacgcggggggcaacgtgctgcgcgaggtcatcgtgcgcaagggcgtggtgggctacaagaaagacgagaaggccggccgcatgacgctgctgtacgagggcacgacgctggccaagatgctgctgctcgtgctcatcgtctacacgtactacgtggcccctcgcatcgaggaatcgagcgagctcaggctgctcttctccgtgggcttcttcgtgtccattgcgctggctgctctgccattggtacgggccgtgacgctggccgatatatatctttgctgttttactgatcgtattgctgtgtgggtttcagctacgcaacgtcatgggcgcccactacatgttcctgaccaatatgctgcatctggactcgcggatctacttgcacgggtcgaggaaggggaatatctgcgatgccccgctgggctttattgtgctggccacgccggacaataccaagactttcatccccgcgggcggcaccgtcagcaacactacagaggtgtttcacaagttcctgtggccgctgcgcttggacgtccagcttcctgctgatatcccggccaaacgagtgcgcaagttcgtgcaggatatggaccagttgctgttctgggacccggttgttgtccttgcggccgacggaactgcgacgctggatgctgacggaacttcgtccttcatggacgcgtcgactccgcgagaaagcctcagcgttcggggattcgcgaacgcggggcagatggaaatggcggccaagttattgtttgatgagaaccaacaggaggaagagaggattatacagcgagcacgaggcaacgagggctacgtggcgctggagcccaacaagcgctgggtgatccagttcagaacgtttgtacaggcgaaacagaagacgcacttccggcaaacgcgtgccgcggtgagtccatgcatcctgagtttacccaaagcaccagcagcttttcactaaccaactgacattcgtgtgtgttacctatctgcgttgactactttgttgcacacagtacattgaggccatcacaaaactaatggagaaacaagggaccgcgtttgggtcccgagctgcagtgactgagccccagctggcagatggagattgaagccaacgcggaagcttagccggcaactgcactgataagtcaagtatccttttgcttttcccgcacctggtccaagcgcatgctgacctcaatggtcgacatgtacagagcaagatctccgtcatcaggaagaacctggaggaggtcctcggggctgagcgtcaagcacacgtggttgagaatgctctccaggatcgcgctttcgtcgtggaatgtagcgccatccgcctgaaaagcgagacgtaaggtaagaacacgttgaggagcactaagtgtcaaaagatggtgatgacacgtacctctgttgcgttgtctgaaatggatgatagagtgctgatcaagaagcgccattcatccaaggtaacgcaaaagctcttgccgtacggcaggaataaattaacgaagtcagcgcgttttgcaatgagattcaagccgtccaccgttctgtagcacaaacagattagtacttatactcatcgtgaaaggagcaagatcatcggcaaggctgcgtacctggacacgcgaggcaaagtcaagagaacaacaagtgcagccagatcgttctcaaggttccaccccgccacgtcgggtgactccgaatccgccacctcatacactgatagtacgtcctgaggatggatgaggtccttctcgtgaagcagtcccaacgcttggtagaaaagaaacccaagcgttctgcgcagtctaggggccaccgacagacaacgcgttttcagatactcttgcacccagccaggaaggaatccatgggtagttgactccgaaaccatcggctcaaacaagtcgcacaccgtagactccacacgcctgccttcgtcgttactctctgagccattgaaacatgagcttagagtgacgcaaaggcgcgtaagctccgctgccacagctgccttggcgctatgcaagtcctcttcgtcatcttgcacctcttccttctccgaaagtttttcaagtgtcgggaacatctgaagtacgaacaccaggaagcgcagcactagcgcttgatcaggaacgaacgacgagttgccctgaccagcatcatcacacgacgatccgctcgaagcaatcctcgctgccgacggagccgcggcatcaccaattgcgttcaagcagaatagcagcgtggactggatcgtttcctgacgcccgatggcgttgttgaaaatttgctccaggatatccagatactttgacggagcattttccagcagcgccttggtcaacgtggagctggagaagcgccgactgacgccagtttcccgcttttcttcctctgaaagaggaatctcttgaataagcagatccggatgcgtgactgtcaggtggacgagcgcgtcgacgcgattcgcgagcaagtcgttcaccagtgcaagcatggacggatacgaacactgctcgacgaaatcctcagtagacgccccttgtgaacttttcagagcgtcccaagcctcaaccgaaaatgaggttgcgcgcagcactagtacgagcctcgcgatcttgacgaggatgctgtggctagacgactcgtttaacttctcgagcgcgaacgcgatatcttccagcgtccatttcaatgaggagtcgacaatcaggcgagaaagttgctccgggaagtatttgccgtagtgtaacaacacaatcctcgtaaacttggcgtcagttgagcttgaatcttgaatcagctgaggagcacaaatatctgcgagcgattctggagaggggaacacaaaggcttccagatactcccccgtagctctaatcacctccgaccgatccacagttccgacgatagcttggaggcggtgcatcacgtcaatggacgagacgttcgacgccacaaacagaagagcagccctctctaagttgcgatggtgcttcgacatgaacactgctgctagatccgccgcacattccctggcgaggcggtcgtacaactttgtctccagctcaagagccaacctctccttccggtccgatattgaagctgcaacctcctttcgagcagcttcattgttaatggcaaggcggaggagatcgaaacccacatccgcgcggtaacgatacagcgagaacaaactcaacagcaagtcgatctggaacggcttcatatctccgtcggtagatagcacgccttgacgcacgtaggagaataccagcgacggtgggctttgctggaaaatcatgatgctacgctgagatgggtcttcctcgaagtcgagaggtggacgcatttcgaactcggcctccggcagacgctcggctgcagctagactcgccacatggacgatgtcatttggcctctggtacgccaacgagttcacttgcgggagcaagacgacgtacgaatcgagagccgctagctgcgataccggatacggaatcggctgggtgcaaaggagttgcggctgcgaaggttggggcacgagcgacttgctgagcgcacgactggctgccacgtagtgacacggactccaaatggaccacacttgtagccctgacagagtcgcgacaaacaggaaagagctgttggccgtgatactggtgaccgctgacgtgaagttgtagtgcatcaccacgcgcccagactccgtcgagccatctgcctcagcatcgccctggtcttcatcctcctcgacgctggtaaaagagtctcgactcttccccacgaccaccttccccactttgatgggcttgtgcatgcccctcgaccgcgtgcgctcgtccttgcccagcaccttcttggacattttcttcctcgttgaatccacttcctccgacaagaagtagtacaggaatgcgtgcttctccgtcgctaccagcagtcgcgtgtagctcctcgtctcgacacaaactcggttgtcgatagtctctggcaggaacttgagcgagcgaacgctgtggttcggcggcaagtagcgctgcagcagcacgctcacgtcgttctccccaatgaagtacgacatggcctggttcgtgcggatatcctggctcttgaccaatcccgccaggttccacacctcctgctgagcctcattgcggcccagcaccatggggatctgctcctgctcgtcaaagatccgctgctcgtcctgttcgcgtctggtgtcggcttccatcgtgctgtaggccgagcaggacacgggcacctccacgaacgcatcgaggtcttcgaagctcgtgatttggacgcactgcgaagagtcctcaggcacggcggcatctccgtcctcctgcctgccgctccagtcctcgagcgccatcgtcttgtccagcgttgcgtcaagcttggacacctcctccacgtccttggagcttctgacgtggatctccatgacgcgcacctccgtctgcgaggcgaaggacacgtagacgccgtggatggccacgtactccacctgcatgaaggcgtggcgctgcgccatgtccaccttgagctccatgacgtgctcgaagaagccgcggctgcattgccagatgttgagcacggagcccatggccaccacgacgcgccccgtgaagctgcagacggccacgcagtcggccttgcgcttggacgacgggctctcgagcacgcccagcggcagcgtgtagccgcgcaccatcttgcgctcgcgccagtcgtggtacacgcacaggaaggtctcggcgtcctcgtcgtcgccgtcatctccctccttggcgtcgctctccagcgtcacgaggctgtccgagaagctcgtgtagtgcagcgtgtacacgcggctgtggatggccgcgaactcgtgcagcagcgccgagcacgacgccgcgtacacgcggatgacgccctcgcggccgctggccacggcgaaggtcgcgtccgccgtggtgcgcgacgcgctggccagcgtctgcgcatcctgcgccgccgcccccagcgccagcgagcgcacgaacagcgactccatcgcgagcttcgggcgagggaactacagcgttggggatcagttgaacgtgggtacttaaacgaggtgcgcgtatgcttgcgtatttaaccaaaacgatacttagtggaagacttttgctagtcgccgcgacttcgacatggacttccaccattgaccgacgctaccgagtagctcacccttgtcgtgcttgtcgtcgttccgttgccgcgagcaccatttttttgctgtgcgaacgcgtcagatgcgccgagtcggaagcttgtgcggttgaagcgcctgcgccggcagtcgatcgatctcactgcgctcgacaagtcggcaaacggagcccttcctttccttctgcgtgttgcgatagttgcgcgtcgtcgactcgagcgctgataacggtcgaggatttttgttgctaacgctgctcctgtttcattgcggtttcgaccagcgcattgacttgactagcaagtgctggtgctgcagcacttcatgtagcttgcagcggagcccctgctcaagaagagtggagttagcggtggtgctttgcatcagcgcgtgcatggtgccttgctgatgtggatgccatcatctcttgacgcctttgacaccacgtaaaggctcgacacctcgagcgcgtgtggctttgagatgaccaagcagcgacggcgccaactaaaactgcattcgcgcgatgcggctgcgcccaattcctggttcagaacttcctggctcggcttccttgcagtcaattgcaaaggactgtgctcagcgctgaatctggggtgtgcttgccccggatccatcgctgaaggcggcgttgttggccgagaaggcgaacgccggccgagatgtggtcagcactgataggagcgagctcgcgcacgccagctccggagatggcgacagtccacaatcgctaaccgttcgaccaagtaccgaggcgacgggctggtgttgggccttcatggctgaccggagcagtctgcgaaaagcgctcgagtgcaacagcggtcgcttgccctctgtcacttcaacactacagctatctattatctacacgccatggcgctgctgcagatcaggaacacccacaacgcatcagccgcccagcaagcagacccgtcggcgctgccgctagcgctgatcaagaagacgccgctgctcccgacgctgagcgcgcgcggccagttggcgtccatgaccaagagctttttcgccaaggcgttcccgtcgccgcacaggaagctgtggggcttccagagcagccccacgggggccgacgacccgaccgaggcgagcatggcggccgatgaacaggacgaagacgccgcgcgcggcgagatctgcgagatcatcgtggtggccatccagaaggtcaccgattcggccaccgacgacgccgcagagaacgaccgcgtgagctgcatcgggcccggcagactgcacaagtcgtcgatctggggctccgccaagtggtcgcagggccagttgcagttgccgcaccgcgtggcctgcacggtgcgcagcggcacgacgaccaaggtgtccgcgcagcccgagcgcagcgacaacgagttcgtgttcgacgagaagtttgtctttgagaggcgggagaacgacgcgcagtaccaccacgtgaccatcgaggtggccaacgtcggcttgggcagaaagcaccagcttggccaagtggcggtggacctggacgccgcgttcgccgcgcaggcagcgggccccatctaccgacacagcgccttgacgacggcggacggctccgagtcgagcgtcgagatccactacgtgcttcaccgtctggtagtcaagaatgcttcggccgccgcggcttcccgcgtgctcactcggtcaagcaccagcctcaacgacgacgaagacatggacgcctgcgggcaaatcttccccgatttatggtatctttgctaaggttgcagtctgcggcagcagcaacttgctgccagcaagtaaataagtaagagcgtaatatcacgcagttctctctccatcctatccaacacatcgtgcgttttacggtagttgctcgttcgttgcacgacggagctccggttcatgatgaaccgaccgccacgtacctcgttggcatgttcgaggtcggtgccagcaaggcgcggagcaacagcaacagtcggtctgcggcggccagcgcgtgctggacgggatttagtcactcgcctcgaccgtcgaggcccgacgccagtgacgccgcagtatgcacgaacgaattcctactgtgcatgcccttgctgcgagcgtatctgccaccaccaagcagcaaacacatggcgagcgtcaccgaaagtagagaccgaggccgtcagcttcgtatggctcggtccgccttggctcggcttttacgacgctgactgcgccaggcgtgcggatgcaaggcgggagcgcgcaagtctccgctactgtacgtcgagcgggctcaaatgctgcgactggcatcgttgcgttgaagtgtgtgtgtacacagcatagagctatctctcatacctgatcccttatgccctactgctctgtcgtgtacaaagacttcagtacttacctatacaaacatgcttgtttatcacggtgaactgtattttcttatcatgctgacacagttacgacgtctgaggtttctgactttatttatccagtttgacgggattgtcgaaccctggttacattttcggggcatagcccgaatccggccctatcagccagaactccatctctctggccgcggcttggagactcttatcggcgcagcagcggcaccgacaccaccaccaccaccagcagcagcacctgcagcgtcgtcgtctacgatggcgttccgccgcgtcccgcccagcgaggaggaggagtcgtccttctcgtccacgtccaccatggactcggactacgagatccccgtggcgctgcagaagctgcacgtctggaccagcgagcgcgtgtccaccaaggtctcgcaggcgctcagcggcatgaacaccatccgcgagagcgagtcgatgcgcttcagcatggtcacggccaacaagtggaagaagatgggctaccacccgtacaagcccgacgcctcgggctacacggcgctgcaccgcgccgccaagcgcggcgacgaggccgtcgtgacctcgctactggccatgtacgacggcaaggccatcgacttggcctccctcaagtcctacaagcagcagcagatcgcgctgcacatcgccgccaagtacggcaacctggaggccgtgcgcctgctggccgccccggagttccgcgagctcgtcaacctgccagatcgcaatggcaacacgccgctgcactttgccgccacctgcagcgcgccctccgcgtcggatgtggtcgcgctgctgctactgcgaggcgccgacccgaccatcaagagcaagcgcgacgtcttcccgatcatcgcgcacgtcctcacggcgcagagcgacgacccggagatcgtcaagctcctcatgaagaacggcagcgaccccaacaccgtcgacgctgcgggtaacacggtgctgcacattgctgtgtcccagggactgtggaaggtcgccgcggcgcttgtaagagaacaagccggcatgacgatccgcaataaccaaggcgtgatggttctggatatcctgtcgccgccgcagctcgcatggctagccaagttcatcgtgcacccgccagagtgggtaccctacgagacccagcgctcctgtatggtgtgctcgcgcaagttcgggctcctcgtgcggcgtcaccactgccgactatgcggtcgtatctgctgcggcccgtgctccaagtacaagcgccatctaccctttacggacatggccgtgaagcctacaagcaaagggcggcatgagatgatgaaggtctgcagtacctgcatcaccgtccgcgaggttgcgcagaatgatctgtcgtgggcaagcaccacggcggaccggttggtagcaagcgacgctgttatcgactatgatgatgattatttgctcgtggagggagacgagagggactaaagagcggcttcgagtgaagaagtcggcgctccatacagcagcaaagggagggatggagcctccttgtcgctctcaattggacgcgcatcgtaatctcggcgctctcctgctttctccatacaattggatgtaccatgattaaaggggtttctagccttagaatgcacacatctcatgaatcgaacgaagttttacatgcgctgggccttcttatctttcttaccaggtctgatcggttcaagtttaccacctcatgaagcgaaaagcttgacgacctactggctgctctctatcggtaagtgacgcggcaatgcgaatcaaaacgttgatggaaagacatcagtctcttgacacgagttggggcgcttttacgaacataccttttgcttcgacaccggctggcttcgattacgtcgctgcctttggtgttcgtcaagcgatgcgcccttatccacgtgtcacctcttagaagcctttcaccgcaagtgcgataggtgtcttcaaccacagaaagcaataacacgaagcggctttcacattttcaaccgtgctctttgtttttctctggattatcattcctgcgccgccttttgcctcgcaggatcagtcagcacgatatatcctcgcacaccttcaagtgtccgtatttgatgcaacctagaaccgtctacgcctggtaggcgccgtgcgtgggcagcatcatcgggcctccatctttcatgctgcaaggggaaacagagcaagctacagttagcaaccacattacccatgggatacggcatccaatggccagcgtacctcttgaagtagtagtagaggaaatccgccattatcagcatgtggccaatctgcacaaagatcaccgtgtagcccacgtgctggccagcgtccttctctccgagctcgtggtacgacgagaaccagaacaccaggtgcaggaagctgccgaacgaaagcgcgtacacgaagtgcgagatgcacgactccacagcgccgccgccctgttattggtacagcaaccgaagcattttagcgtaagaagctgcaccactcccagcacatgagcccaaaccagacgaatacttacgcgcttctggaacatgaacagctgaggcaggatagccatggcctcaatgtacagcgcaatggtccaggcaacgtctgaggtccagttgcggttcaggttcgggtggatcagctaaaaggcagcgaaagcttgaggttagactttcataacacccttcagtagcgcaggattcctactcaccatgccgaagaagatgcagggcagcagaatgtaaaggccgccgagctccgtgggcaggtgcagccatccgaacgtgtcgtagcgcagctcgtaggtcgagttgaagcgcatggtgaccaggtagatgacgccgcagcagagcgtaagtgccacgatctccaggaacgtgtagagccagtcgccgctgcggtcgtagggcaggtagccctggtagcgcaggatggagctcagacggaagaggaacacgaacgcgtacagctccagcgtcttaagcgacagaccggccaccgagcgctgcgagaaggccttgaagatcaggaaggcgaagccgaaggcacgcacgaacgcgcccatggtctagaggaggagaaggagggagaaagcagttacaaccagcgtatccaacggaggattagtctggctggtacatggcggcacaagcaagagaaggggagtgttaggctgtaccataaggaaggagaagtcgccatcgctgaacaagtggtagcagaagaacacgaccaccacgaagcccgaccacagcgcgatgttgctcttgtgctgggtcaggaacgcgctgtaacgcagccatacacaacaccgaggagggtaagatgctgcaagcagaggggtgcaggagcggggaggggaaggccacgtacgcgccgggggacttgtccttgctgttgaggtccatcatggctgctgctctgctctgctctgcgctggttcacctttggtacgaggtactgagcactcgacgccccgccttgccgcaaaagataatggcaacgcgccgcgtaggcaagttactggaagatttccggtcgtccggtcgtccacgtccctttcggccaatcagcgccggataagaacgcgcggtcatttggatacatctgtgccgctgctgcgtggcagcgtctggagcccccatctgcaaagcgcatgatccaggccaggcgcggaatgggatggcattggctggtggaggcagcggcagcacaagatgtcggatgcagggcgttatgcttcaaactgtcgggtgtcgtagctgtctctacttcaaggctgcagctggctggtgattgctagggtagcttacccaacgaccaagcccacttctgggagtatatgagcgtgctacacgctggccagagtgctcaacgtcatcaatgctactactgttcgggcccggcttgcagtcgaggtattagctctctccagggcagtaggcatctgaattcgtaaagggaccaactgatgcatacagacgatgactgagttgctatgataagctccaccaaaacgtctgcaacttggctctaggtttggtgatggaaatgagtccctcagctaaataagatctctacacattgatccgatagtaagtggattcggctagagctaataactgaatatcatcggggctcaatggcaaggaaactcttgacatgctggcaatgcagcaatagtagggggcgctcagattgagtaggagagatgataatagttagtcatcactttcgactgaatcatcgtaaatcaattcctcctcgcgcttccaccagggaacaagacacgcaatacatgcacaaagattggggatgtcgaaatgctgattcttctggaggcgttagaccgcaaaacgcgagtcggcacctcccaaagtgcccagcgcttctggccgtcccaagggactatcacgtcgggctgatggacccaacatccacaagaggggcctgctctatgcctccgtgtacaaggtacggaagacccaagcgacgcatggaggagcgacgtgagtggcaagtggggcaactgatcaatcgggaccatacacacggaagaacgcggtggtgcagcgagacgtcactgtcgctggagattgtcgttttcaagtcaagtcgaatggagaagtgttcaaggcggagctagcgtcggccacttcccgcgaacgactggacggtattgaacccgcttgcgattgggtaaaatgcactgaaaataagtgtacggttaaaatgcctcaaaactaaacaccagttcggtttcagcagtttcgaactgtcgtttcagaatttgggcggtcctaaacattataattagaacgttccagactgcacactatgctgcgctgcatccacaacaccgttcaccctaattagtcgtgccatgactatttaccgtgtacgacctgaagagtggctcaccctgttttgaaattccgttttcgggaaaactattcctatctacgataaactaaatgcatcacgcaattcgtcttgccaagatctactcgaatccggtctcttttatggatttaaggtgaaaatgaaaatacttttcagaaccggtggaatgattatcaaaggtgcacgactaattaggtcgcacgactaatacacgtgtgctctcagctagcaaacattacacggtgaagcagaacagtggatcctactctccattagccagcggccgcaaacacgttcaggcagtaggtcggtctgtgctttatcgtgagtcttcggagaggccctgtgcatttgcaagttcaatgcatgtggcgactcgtacccgaggatcacctgccatttgccttcgtctagcataacacgaagactacctcccgtgctaacagaacacgacacgaaattgaaggcggacgagcaccttggaagaatcagttgtattaaggagtacgaccaatttcgtgttttttctgaacccatttcaacttgtacctacctatatctcgacaactaggatacattggaaggaaataggcactgctcctgaatgccgattatttgggctagaatttaggctacttgccagcatttcaaccactcatagtacagtgctagacttgaatcactgcagtgcttttcgtgttgcctttttgacttgcttatagtatgcagtgccgctctccttgcatgggattagtaaggttaggggaccatatttgtacttttagcgaataggaaagcgtaaaaaagactacagagctatttaattggatgaaatacaacaacacaaaactggttggaaacacgaaattggtcgtactccttagtggtgtcttccagatctgacgtgccaattctaactttcacaagtcgactaatcaacaaacccgaacttctgaccaaattgcaatttccgaaggttttggatgacaccgagcgacattcacgccgcatatggatgccatcgaacaacttgcacattacattagacagactcgatgggagagcgaagagtttggcttgacgtcaagactgtggacaatctgagaatccaccaacattttccctgcgtagattgatgtcggatacccacgattccacctgaggaagtgggggcttcaccacaagcaatgtttcggtcgaaagaaggcaattcttgttattccactatacggtttgccgtagtaatggtatctcggcatcggtgttaatgatgctgaccgtgagcacacctggtgctaataaactctatgatcattaccacatcactgcaccatttccgggtcgttcttcccaaatgctcgattcaatacaacctcgtagaaaaaggacgcgtatactttttggcgacttcagaccaaattctcaatttgaaatgcccaccgtcattttcaatccgcagttcgtaagaactgtcgtttgcgcccctgcggatgtttgagataatgcaacataaggttttatgttgcattatcggttaaagagctatttgaaacaacagcaatgacagttgtacaggaattgtcatacatagcagcgcaaactccgattcattacagctcaaagcatgctttcggcgacaagctaaccaggcagcagcactaataaagaggagtgatcagtcaatcaatgcaatttgtgaggaatcgaccgaatcagggcagcaagcgagcaatgggtaggtcgccatcgtatcggctaagttagtttaggcatgtggctgtcatttctaagatacgatatctgtatgtacatgtcggacgccacagcagcaccaactataaaccgtcgttgaataaaacaaaattatcgctattgattattgtaataaccggccaaaatgcccacctgtagcaaccgcttattagatctcaatcacctaattaatcagagtataaatcaggttataaatcgattgtgatccatatgcatcgctaggctgcacgattgcccagtaaaaggtgggcattctgctccaaacgcgtctatatcgactggtttcacataaatcgatcgtacccactcacgtatgcatcgcagggacgcgatcgatttattgtggaaaccgattagattgtccgagcggattagctgataaaccatcgttcatgagagatttgactggtactaaatcggggatccttatgattgcatatgtcattagtaagggtataaatcagtgtagcgttagtaaaatagggattgcctcattacccgccagcaatacgcggaacgactacttaccaccacgagctgactgtttcgcgctcctactaacgagcaataccatcgcgtgcattaaatacttctctgtgaacagtcgacgtgtactgctatctatttatcaagttgtaaagccatatatttgcgctgtcatttctcgtcagcattagcgtttgtcgattttaccttaaatccgccgccgaatgccgaatgggtgtcggacattcgggctgattagaatgcaaatcagtcgtctagagctttgtaagcactgagcagctaaatcagcttaccacatggcgttgtaggcacaacagactgctctgtcaaatcagagtgcaaagcttaggctgtcgatctaattaggaggtcggatttagtaaatccgacccgattaagcttaatcatctgcttaaccaaccgatttatattccaattagacaatctaatcggttcccacaatacaaatcgatcgagctaaatcagggtgctaatcaatcgatttacaaagaagcggttttcacaataatggtcgtgggtgcagactgtttgttaagagtcgactttgaagtgaggagacctaaacggcattgaaatcagtatagcaattctacaaaatcaagttgcaggcgtcaaaattggacatatagcccgaataaccccataaaataaacacattatacattcaacatgaaccgaagctcggtctggcagcttacagctgcgcagtatgtaccatgaatagcagtaacgctagtgtgagttcatgcagtaatagtgagtggtatttgcggagcgaccaattcccgaggacatcatggacgcgagcagcagctacgacatggacgaccaagacagcaagtacgacaacttcaacttcaacgagatcttcaaggggtacacatagatgacacacaactcctacacgagcgactgtgtggtggagagcgtgcgcggtgaagaggcggccgagccgcacccacaatccaattcttctagtctccccgacttacaatccaattctttccgcctttccaagatctcaagacttcctagtgtactccactaacatgttagctaattttacgagacactaactaacagttagttgtaaactatacatgttagtactgtatagctgcgctgtatagtttgaaaatatatttattaagcgattctgctacgaagtctaatcaacagtctagtttctacgggtccttctctagggatcctgatataattaggcgaagcaccatttgcttcctcgctttcaaattccgctatcagctgcgctggcaagtggtgaggcggatcccatgtgagctcctcccaacctacccattttactaggtagattgggcggaaattcacggttcggcgggcgtaaatccgttctgcatgataaatccccggtccttcagccgggatttcggagtcagagtcgtcttcgcttgatgttgcatctgataggtctacatagtcactaactaggccaataggaacttgcaacgggctctcaggggggccagccagggatggtgagtcgggcgatacatcattgtcgaaatcggtattcaactgagagggagttgacggagttgacggtggggtgggtcgaggggaagtcgacggtggggtggggtgaggggggggttgacgacggcggggtggggtgagggggggggttgacgacggcggggtgggttgaggtgacgacgatggggtgggtggaagtggcgtcgtaagaggcgtttgactgcgctcccacattccgttgcgcgcgtgtcgtggccgtagctcacaagcgtttatataaatagagtttttctcctccaccaacatttactcacgttgacctatctttgtgctctaacgctactacttagtaacatgttagctcaaaatactagacactaactaacagttagctaacatgtatagcaactaacatgttagcgttagggagtacactaagacttccagaccaagacacagcagtagcacgagctgccgcaccgaccagcacggcggctagagactccggcgcggggacgtaagttgagtcctctgctgccatcgagtgttgacgtctttggtgtgtgagcatgtgaagagaacaaatgaacaacgagctatacgacctgagcaagcgagtactgtgcagaataagccctctgcttacttggtggttcatacagggactagttaacacggctggcttgagtcgctgtcgagcggtaagggccttcacgaagctagtaccagtggcacgaattggcgcggtgaagtggtgattgtggcgatgcttcctgtgtggattggagacgtggaggttgtggagtttgtggagctgtgatgtcgcagcggtggatgtacctgaatcatttgaatggcggcgaagcggagcgagtgttgtggcgcgagtcttgacgtggagctcgagtagctgtgaggcgggtgtctgcagccccgtgagtttcgtcggtagaagaccgcgacgcaaggggaggacttgccaaagagagggcccggtattttagcccccggcagcccccttgacgaatctcggcgtggtatcgagtgcccaaccacacctgtgcgtgcaaggataagtcgacggccgaccgttgtattctggatgttgagaggcagtttgtgatcgtgctgtccttggccggggacaagactagcgcactgcacagaggtggcaagacaagacgagcactacagtcactcggaggagatgtgtgtgaaagaaatgagttgagtgtgaagaagatgatgagaacaatgatgactgagttgacgaagatgatgctgattaaacgacttgaggaggaaatcgatgcagttatggacatgacggagaacacgtgcgacagcagtgcaaacgccatcatcaagatgaagcaggagacccgcattgacagcatgagcgcagtagctggatgttggtgggtaggcgaagaacggagctgccgaaggcgatatcgagaatagttgccagtgcagcagcgacagcagggtcaagggttgaagacgacaatcgtttggcggtcaggatgaagaacatgtacgacagcagtgctgacgccatcaccaagacgcagaatgagttccgtatcgcagaagctggaggttggtgagcagacgaagagcggagctaccgcaggcgcgtgggttgatttgggaatgccggccaagactcagcagcgacagcacgattaagattaacccaccggcgaccgttatcccgattttgctgggataagaaaaacctcgggggaaagtgctggttcaagccatacaggtggttagcgtaactgcgactcttcaaggtcccgccgagagcgttttggccaatgcgatctgtttgcggatttctcaccttgaaatgtagatgggcatgggtgccgggcttatgcgccaccattggccaccgcacaagcatttacacccgcagattgccaggtggccgcgaaggattagcgcttctccgctatggtaaaattctgagttgataggatgcaccgctcactaatgttaactttcttttcccttgtatcattgcactctatagatcccttcacacgcgcgaggtacgctggtcgaggagctacgagtacggctctgccggtgccactgcgaagaccgagttgtttcgatcgagacctggacactcctgttcgtggaggagcccgaccgcaacttcggcaatgtacgtgaggcgtcagggctactggagctttagcagaagggaggctgacgctgagagatgttgtgtactcggtaggtgtgcgagctggacaccatcttcaacccccacaaggtaaggcggcgtcttggcagctttggcgttcatatctaggggctcatgctggtgttgtaggcgtattacattcagaacgagctgttcaccggctactctcggcaggagttgagcaaggaggcgatcttgcgcatctgcacccacctaagctacgtgcccccaccgctgaaaccatgcgggcgctgacacttcaccctaacgcgagtcgactccacagctaatgtccaagcgcgatgccgaaggcacgacggtggaaacaagcggcagggaggacgccaagagcacgacagggacagcggggtgtgacaagactccaagaacgaccgatacaacggcggctagaagcatggagtcttcatggtcagctggggtctggttacggagcccacgatgccgtacgtcgactcgagtaagctcgtccgctacgaacacttcatcttgtattgggttctctagacctcgtatgacagctcatggggcgacagcggcttcattacgctgtcaaactcaactgcaggtcgaagttgattagagttgtgattgattttcatgcaattaatacatagttgttggtttgaccctcggcggcaatgttagagtagtgatcgtagtcactgcatcgaccatcttggttcagctgcgtacaggtgtaaatcccgaagggagctgctgtaagtcatcggaacctgaattgttttcagtaacttccaccgcttgcaaaacgaatttcggcacgtattacgatgccgcggacacactcgtgttgtcagcgccaccagacgtagatgaggtagcttcatgcacaaagcacgcattgccaaaatcacatcttcttcgaacacagtgtcgtggcaaaataaaaggtggcggagctgataagggagctgggttgagccaaattcgagtctggatcagcactgataacagtatcgctgccttcagcaatattgcggatgtctgcggtgacgacgctgatcttgagcaagtgtggaaagcgcgatgcactagacgcaatcagctccatacctctagcggccaggtcacgttggatctcaataccaaccacacgaaatgcttgcgtttgcagagcgatttgagcgagaacatttcccacgccggatccagcatccagaaacacgtcattcacttgaatattcgcttcttcgatcagcatggacaccccagccattgtaatctccccggtatttagctgacgttcactcgcgctcacatcacgcctggtgagtaggcagaatagcccttcagtggcgttgtaggtttcttgcggtgataggatcgaaatggtatgtggtgaaggcgaaaaccgtagaggagacgcggctttggcttctaaatgcagtcctgctcggtctggtggcgggcggaaatagcgtggggggaaactcagcacgttattgccatatcgtctcttgagcgtcttgattcgctgttgcagtttggttgcgctccatgttgacggcctcatgtctttctccactgacacccagtcgattcgtcttcccgcttgctcgtacaccgccgcgagctgaacgagttggcgatcctcttcatctgaaaagttggccatttttcgcttcggatactgtctatacaaactcaagtaaaacgaccctttgggggttcatactgaaaccgagtttattttttggatttgtaagtcaacgttgggtcgctgtcgatcgagtcaatgtaggcttgttcagagtcgacgttgacttcgctattactgaaactagtacgtttgagtcaatgtcgacttggtttaagtccatgttgacttcgcgatcaataaaacaagcgtattcgcgtcaaagttgactcgctctaagaactcggtgacttgaaaatgtgtatatattcatcgtttcgcagcagcacacacaactacagcagactaaggattaatggttttctccaacacgcccaatgcttccataatctccgtgcatacacacacgtatctgccgtggtccatcgagtgaatgacggtacctgtcttgtcgtggaccaactcatttctttctcccagaactcgaccgcaagcgccttgaactcttcagcgtccgccgtcttcgatccaaacgcctccttcattttgcccagaatgaagtcacgcttcttctgcattgtgctcgtgttacctacattttttcaatccagagacaatgggagtcaatacaatgtcaaaccacactgaagcagaaactcaagcggcttaccatttcggatctcggcgttccattttgtgaactcttcgatagcttccttggtcaccgcgctatacttgtacgtatgcagctgcacctctcgtgtcttgcaatccgctgttctccgttttcaccgcctctagcgcagccttcatcgattccaactgcgttctcactccatcccgttctgcttgcatcgccgccctcacttcctcgatccggttgcggttggcttcgagctctttaaacgcagctgggcacccgttgttcttgaactgctcttccaggagccgggtctggcgcttcatttcattcaaaatcttcgcctacctcagcgatattcggcctccttgttgcttctctcgactcggcttctctcgtttctttttatccgcgtccaactgctcccgctcccgttgcaggcgatgcgttacgttctggagacgccggccctcctctttgagcttggcctcatgagattgcagcttctcggctttgacttgtagttcttcctccttgttctccgtattcttctctcgcgtagccacctcgttctcccggtcctccagttttttttgcgctcgtccacctctctcgtgaggttgttcatgtcttcgtgcacatcctggagtttcttagcatggctagcctgcgccttaagtagattgtctgcgtgcgtggtgacggattgtttcgacaaattcaactcagtttccacatgggcaagtttgttgcgcaagccacttgaaatcgccttctcctcggctagttgtaaaatcgaattccgcaactccttcgtcaacgcgatagttatatcgttgtctgggagatcaaaattcctgagttcggtcagctcgttttcagcggctgctaactgctcctctaatttcctggagcgcgcttgctccccctctagcttctctcggaactgctgcagtgcttgcgaaatagagagttcaaaattcgcatactcccctcgcaaagggtgggtttgcaggctccgagctggggcaccttcctcctgcacggccacgggtgtctgcgagattggaggccctggagcttggtctgacgctagcgatgctaggtttctggctgcggtaagctgctgagccgcctggatgtcgcattgctcgatcgccaggtgctcggctccgccacgttgcgatagcttcgacgaacccgatccagcggtctgcgcgtgtgcgtctgctttcagggcttggtccgctaagtaacctcgtagaactctttcagcagcgcaggatcgtgacgctggagctcttctgggttgtttttgaacgccttgaattgagtcaacttgctcaaagcctcgtagtccaagtcgttgccgctgttcctagcagctgtgtatttctccgcccacacacgcttctggtagtctgccaactagtagaaatcatctgccttgcgccgtgggccttgccggcgctcgcccttttcgtctgcgatcttcttttgtagagccaagcacgtggaccggagcgcgtgcttgggtaccaggggagtcgtctcttcatcgcgagtcgtcgcctcgttctccgatgcactcgcggcgcccaactcgcgcgtcgtcccgttggatccttcgccagtcttcttggcagtattcctctgcttacggggacttggcgaagtgtctggcccctcccccttcttccgcttctgcttggcattgccggtggcaggcgtggtcttggcagcgtttgctgacttgtcagtgggcgcgctcgtccgctttgtcgctggcttgtccgtcgcatttgcagctttcttgctcctcgtcatgggcgcctggcgagcagcaccgacagcagttccctcgctctctgcagcctgagatcgcttcgccatcagcatcgccatcagcactttgctgcactcaaggttctttgagagagtgaaaccgcaaatcctacagttgaaataaatggatgtggaccaattcgatttggaatcaagaggactgtaaatcaacgttgatttggtataagtcgttgtcgagctggcttcagtaacaagtgtctaagccagcgtagacacgttccaagtcgtagtcgacttggtgactcaatgagagatgtacgagtagatgcacatggttgtctttacaaaaagatgcagaagtggtgagataagcgccaacgcaagagtggatacgtcaaattagacatttactgaagctaccagtcacctcttcagcattgccggagcaccttagcgatcacgcataaactcttccagcgtgatgatgtaggcgcgcggcatattgacggtggtcagctcgtcatcgatgtggagctcattgacggtgtccacctcgttgtcggggcgcggttcctccggtgcgttgtgtctccagatgttgaggtactccacgtaagtgcgaccagggatagcgtgaccaacacgattagtgttgcttccgctataccaggggggcattcgaacgcagcaaccgcaagcttgtccgagggaatgtgcagatcctgatagcgctcaaaatcatccatccgaaggttgcagttgtcgacgataacgatatccacgccacggtcggggctgcgccaaaggagttctctgcattgttcgtagcagcttcgatgcgcctcccaaagccgactcgcgtcgaacacataggatcctccgcgctggaagaagaggccagctgagcaaatcgatgcgcggaaatcaattgttgctgcattacgagcgacctcttgagcaaacgttgtcttgccactgcccgggaggcctctcatggtcacgaagagccgaggcgggtactgcatatacgcgcggcagtcctcccaatacgcccggtagtcgtcaacgatttgtcgggctttgaactccgtttctcacacgtcggatgtcgtcgaacctccaagattccgctgcttctgatgttgaccacaccatatcaccgaccatgcgtgaacacacataacataagtcaacattgacttgggatagtcaacatcgacatcttggccggaccagttgcgctcctggacaatctcaacggcgtgggcgaccgtcggccagcatttcggcgagcccggctacagcgtcacggcgagcgtagcggtagcggggacagcgagagcagcatgacgagcatggaggcggccggcacagcgagagcagcacgacgagcatggcggcagccggcatgggcgacagcagcacggcgagcatagcggcggccagagtaaggatcagcagcatggcgagcttggtggcggccttggcggcgacggtcgatgcgagccgggcgacggcatagttggggaagcgcgctggagcagtagctggcgatttcggaaatgaggtttgggattgagcgccgcggaaacgatcttctggcacggatcgcagcgcgagcgtgattggccgcgaaatggctggccaattacacgtcgcaaattcaaacgatgggtgcgctgattggcgtagataccggggcgaacccacgggcgaaaatctgcgtgttgcgcgaactcaaagcgcaagttggaaaagcgcgcgaaaagctgtgtgttgcgtgaagcttgatggctgaagccaggctgataccacttcgtgtgacctttggattgagccaatgctgattggcttattagcttcaacttcaaccctcgataagcactccgaattatagtagttcttgatttagtgactacctagtacgagggcatttcttttgcagttctatagtaannnnnnnnnnnnnnnnnnnnnnnnnnnnnnnnnnnnnnnnnnnnnnnnnnnnnnnnnnnnnnnnnnnnnnnnnnnnnnnnnnnnnnnnnnnnnnnnnnnncgtaaatgtatgcagcctttggtgtgtctacaccaaggtcgagaaagtctttcgaacctctaacagacgtcgtatctgatagagttacaagtgactgtagccacttgtgcgtgtaatcctgttacaggccggccaagtcaccagtgccgcaccaccgtgcatcgctgcctcccagccgggagcacggtggcgcggcatgggaggtcaagcggtgtgtgggctcctatatgtcgtaaattgcagtaaaataaaggagggggggggtcatcaaccatccgtgttcttagcgagcgcggcgtattcctcgctgaagtcactggcgtctattcgtatcagtgttgtcgaggaacaggagggaattagtgtgctgtctcgtgagcttttgaccacccagaagcagagctttttcgacggacaagatcaatggtgctagcgctcacctatagaaaccgtgtgcacgcattggttggtatttcatatctacgggtaccgcgttttgtgaggacaccacactggcctaggtagcgaggcgagcgacgttcaggcaccgtttgccatcatttctgttgcagaagaacttgcaaaagtaagttactatagaactgcaaaagaaatgccctcgtactaggtagtcactaaatcaagaactactataattcggagtgcttatcgagggttgaagttgaagctaataagccaatcagcattggctcaatccaaaggtcacacgaagtggtatcagcctggcttcagccatcaagcttcacgcaacacacagcttttcgcgcgcttttccaacttgcgctttgagttcgcgcaacacgcagattttcgcccgtgggttcgccccggtatctacgccaatcagcgcacccatcgtttgaatttgcgacgcgtaattggtcagccatttcgcggccaatcacgctcgcgctgcgatccgtgccagaagatcgtttccgcggcgctcaatcccaaacctcatttccgaaatcgccagctactgctccagcgcgcttccccaactatgccgtcgcccggctcgcatcgaccgtcgccgccaaggccgccaccaagctcgccatgctgctgatccttactctggccgccgctatgctcgccgtgctgctgtcgcccatgccggccgccgccatgctcgtcatgctgctctcgctgccccgctaccgctacgctcgccgtgacgctgtgaccgggctcaccggaatgctgcccgacgttcgcactcgccgccgccgccatgctcgctgttcatctgtcgcctacgccgccactatgcttgccgcagctatgctcgccgtacagcagtcgctgctccgggtgccgctatgcttgccgtcaagttttctggtgagcttcgatgcctcgctgatctggagttccagcgcctcacgatgtcaatgttgacattccccagcccaacgttgaatccctcttctttacatgcacgtgggtgggtgtgcggccgtcatgcccgtcgtttcgcttctcgcgagctcggtcgtgatgcccgttgtcatgtagcgggttacgtacacggtgagtgcgacgccgagcgtgtatttatcactgtgaaaacaatgttgaggagctctagaaacagtttaggacatctagcagtaccagtctatttattattgccaaaggaatctgctaagcaattcacctgcgatgtcaacattggcacttgcaactcaacatcgagatattacaagtatacgatctgctctgtcgtgcttcgtatccagatgtgtttagattcaaaatttaatatcagtatagttgtatgatcaaggtcaacaatgcccacgtatccggatgcaagaagtgcgccttttgcccccccccctccaccgtcactcgttgagatggcacagaagcgccgagtaggcagcgggcgcgacgcccaaccgccccggaaggcgcgaagaaaagcagcgaggacagtgaactccgaggcatctggtaagcaaaacgcatctttcactagcaaagcgtcgtagcgatcttatagtagacgttcataatgccgcagacgacgagtttgaagtcgagaagatcatcgagatgaagttcgtgcgtggagagcccaagtaacatgtgaaatggaagggttacaacgagacgtcgtgggagccggaatcgaatctgcattgtcctgagctcctcaacaagttcaaggcagcacaacttcaagaggcacgcgcgttgaagaaaaaaacaacccgaaaagcggacttgcctgaccgaggtagccacgtgacggctaaaatccctgcaaaacaccaagagggttctgaaggtaacaagcagcacgtgtttgtcacatgctcttatgttggttttgggaaaaatgtactaactgtaataatggtgcccaggttcggaggaagtgtacgaagtggaaaaaattcttcgtgaaacttttcgttttggcttgtcttacgttgaggtgaaatggaaggaatattcccaaacgagctgggagcctgcctccaatctcaactgccctgacaaattggagaagtttaggcgtcgccagaaagcagcacgtcaaactatgctcgaaaatctagctccagctgaagtcaccaatgctaccgggacggtaggccatgacagccctcggaaagataccgatgagaacgagaaacccagcggtggatctacagctcgccaagcaagcagagcatcgattccagaaaataatggagtgggagtaaccaatgatgctgacaatgtggctaccgagagccggcaaaccgatgatcgaaccgaaaatgactacgagtacgattacccggattattttcccgagactaccgaggaagaggcggtctcaaatgcaggtggtggtgttgagccttggggtgacgggatctcaaacaatgcggatgcggatgatacgccagtaccgcgagcagattccagagggtcaggcaaggctcccagaaaaagaaaatcgccccggcagacagcagaaacaaccgcaccaccctcgcaaatcgacgtactctttcgtctcccgggagtcgagtatctgggaaaaaatcgaaaatacgtgcggagatgcttgctgatgaagtgaacgtgggtattgatgacgatcacgaggtgctggaatcggatggctgttctagcgagagtgccgacgacgattctgaagatgattttgcagatgagctttatattgcgggtgataccggaaacgaaagttttagtgtcgaaacagcagaggtaattcgcgcggttgccggcccccaggactacataacagatgaaatgcttcgaggcatgtctgacaatgattgggagttgctaccggtaaccgacgaacgggatgactcggacctgtccggcgctacggatgtgtttacggaccctcctcaacttactgccttggctatagaggcagcgaaaacgatgaaaccttctgatctttttttactacatgccgaagactctctggacggagattgccgaggaaactaatcgttacgagcgtcagacacgaccggaaagacttcgacaggcgaagttgtccattgaaaagaagaaggacgacatccacaaacgcaaggaaatgtttcaagcaaagaaaaaggagctggacgcgttcaaatacgttcttgccgcggagatcatgcattttctggccctagtaatatccagggctatttgcccgataaagtctcgactggaagatcattggaagacgcgagcccgtggagcgatcccagctggaacttggtcgccatttatggttcgcaagcgtttcaaggagattaacaggtactgtgacttccacgttattttaataaagggcccactaacacgtccttcgccagatttctccactttacgaacaaccagtctccgcaggctaagacggaccgggcatggaagattcgaaacgtgataaacaagttacagactactttcaagggtgggatggaactagggcgctgggttgcatttgacgagatggttatcccttcaagaagttcgcggaacaaaatacgagttttcctgaagaataagccgcacaagtacggcaccaagctgttcgctgtgtgttgcgggaaaacccactactgctccaggtatgctcatttgcgctattttatgtaatcagtatccgaacgctgtggattcatgctcaggttcgaggtttattgcggtaagaaacaaaacagtcaatttgttgacaccagaagtggaccagctgctgtggttcgaaaccttaaagccttgtggggacagcgtcgggtggatcgatccaagaagcgaatcatcatcactgatcgcgagtattcttcggtgacgttggggtttcgtttgatggacatggggtactacaatatcgggacggtttctacgacgcgtcttggcttccccgaagacttgaagaccgacaaaaaaccagcttcgagagggatgccgcgcggctcatacattcttgctcgaaacaatacgaatcgtcaaatgtactcgacgcggtgggttgactcgaaaatttgctactttgtggcgactggggcctccgctagacgtgcgattgtgcagaggaagcaaaaggacggctcacaggcaaacattccgtgtccagagtttgtggtattgttcaacaagtacatggggggtgttgacagtcacgaccagttacgcctgcaaaggtacgtgttgctctgttgcggttctgccgcccatcacttacgctgaaaatgcttttgactaggtactccatccaaagagtcatgtgaccgaagaaatactacaagactgttttctacgggcttctctacatagctgttattaacgcttttatcacccaccgtgagtacacgaagctggtggggggaaaacctctttcacaggcggattttcgcattcagctacacgaggagctactcgctctcggagatgatgacttcctggacacggtgccagtcgccgaagccgctgttaccgaggtggagctaagatctaaccaggcaccagtttcgacggcgtactcgctagcaagctcgaagcatcaattgatggtgtcgacggacaagacagcgaagggcaagttcaagtttcgcgtgtgcaaagtttgttcggtactgcgtggtgctggcagtcctggatcgaatcgacctcccggcacaacgcgtcattactgcaagcagtgctccactgatcgaggaagacggtttttgtgttccaaggcgcgacacgtatccgatggtaattctgcatcgtgctttaacatttggcactcgaaatgcaagaacggagatcaactgccgcactctgaaaaggtcggacggatccgaatgcgtcggtcgaaggaggagttacgcgcggaaacgatggacacagcttcctcggatgctgtactgccaaggcaatacgagcccgatgttcagaatgccgatggggctgcttcggtgtcatcttcgcagttaccggttccaagtgtctcgcgaaacgtagaggtacaagtgcatcggccagagcggccaggcgcagatgcagcaggacaggatgaagaaggtgtaactgcgactgagaggcccccggatgagagcgagcgggaggccgtggcggaagtgctggcggagctgctcggcgcggtggaatgtacgctcagcgggaccgagcagcagaatgagtcggataattaggtgggagtcaatatttcactgcgaagtcgatcttgccaaaatacacctgtaagagagagcgaagccagctttgactcgacggcggtcaagctggttgtcaacgctgagatctatgtttcactccgaagtcaatcttgacatctgtcatacaaacttaaattcaaatacgcttgtgagggagagcgaatcccaagctggttgtcaacgttgagatctatgctacaataagaaagcgatgacggaatatatgtaggcatgggcttcttcattacatctcagcatcgctaacaaaatatgtatgcttctgtgaagctgggttaagctctttccgacgtactagcgtctcaacgataccccaagacgaggaaacatcacctcggtttgatgcgtccagacagcaagccactcgagcgcagcggcttcttggactcgaggtttatactcgagctctttgaaaaccccctccttggtatgctcccggatagcattctcgtcgtacgattcatctgcctccatggcgatatggtgttcaacatgggaatcgagaaaagcgtctaagcgttcaatatcccactcgcacaggcgctgtcgacgctttatcatagacagcgttatctacacagaggtcaatggcacgttagcgttgggagtacacctggcaccacagaacgcgtgaaattccttcgaggctttcagggacgcttgcaaccacgcgtagatgtgactcgagtcttcgtcattctgaaactgcgcatacatctcgtagagcggaagggcggctagaaatgcgtctacatggttggtaacctgaatctaggctcgtaaacctgttgcgtaataacatttgttagactacgccacagaactcaagtaattcgcatacccacccggtcgcgtgaaggtttgcgcactggctggagggtgtgaaagtcaaggaacccctggtgccattgaaatctctccaacgtctaggcattcatcggaattgagccatcgtgacgcccactgaaacaccaaagatacgtgtacgtacctcccctacagacaccggcttgccataaattttcttgttgtttgacgcggttcggttgacatccggcgtgaaagcctgttgtatgcaagcaggacggttagatatcaaatagccaccacaaataggacatacatgcacaccgggacagcctcgtaggtgtagttagggcccgagagaacaaagtaggaggagcggtctaagtcggtatcttgatcgttgagctgcccctggctctcggagcgtcctcgcgctgtgagctgctgttggttcgagcgttcgtcgtcatcgctgctgctgccacccatagtgctgctgctgtcggccgccgtgtcgtcggtgtacatacttgcgtcggccatgatcttctcggagaagatctccccacacacgatgtgtactgtaccactgaggagcgaccgcgacttttgacaggttgattttgactgtcgctcaattctatggaatgcctttattttattttatactagacccttacactaaaacacatactcactgcatccgcctgcaaaggctgctgttgcagtgagagcctgttttggcagcaccattgggtattatagccctcatcgctgacgccaccgccttagccaccaccattttggtcctcggcgatccgcctgctttttggcgcgctccgcactctgattcgagatcacacgatgggctgcttgatcgtccggccttgtcctgcagcgtcttgtgatggttgatgccatcgtttagcttgaacacgcgcttcttctccttcatttagggcgcctcacgcgaacgtttgtccgtgtgggctgacgtatgaccgcagcccaacagagcggctctgagagccgccccagctgtatcgataggccttgggtgacagcgcgtagtatttgcctgggtgctgatgggctcgtagtcgaagtctccctgctgcggcgtcgggcctggtgctgggcctgcatgctgtttgggttcacgtgctgctggagttcatgcacgctgggacattgaagccgccgctatcggtgccgtggtccagtgatttgtagtagagcttgggaagttcgccgctgcgctggtggtgcggcgagtgcgcctggtactgcgagtagccgtagccctgcatggcgaagaggaaggaggaagtcaggcgggtgtactgccgatggaatgggggggactggtgccgccagcgctcgccttgcctgcagtcgagaaacacgtcagcaatggggcaacaggctggctagagtgagcagcgtaccgagattgagttgttctgctttcggttgtgcctcgtacgtctcgtcgttgcagtagaaggtgtccctcatgtgccgtgccgtggatagtgtcacagcgattgccgagcatgtccatcaaccgcgatattcagctcagaacaattcactcacttagcgaatgttcgcattatcctgcgaattacgccaaggttttttcgatcgaaatctcgacagagcttaatattacggccgtatccaagctttgattggataactctgaccaatgagattgacagccggtggaacccgaagagtcggggcaggccgctggggacctcgcttaccctatcccgccagtttacaaatttctatattaatcttatccctgcaaaatcgagataagagcggtcgccggtgggttatggacggcaatcgaggaggaggaggacatcgataggaatgcgaggtgcaatttcggagggagagcgactgactaagacagtgcagctttaccgattgttatcgacaggaagacgaggtgcagcttttgagggaggcgacagacgactacagtgcagctttgttggatgaccgactgacatctacggaagaacgaggagcagcgttggagggagagcaaatggcgtccccgagaaggcaagtgcagcttggtgggatgatcgactcgcaacgtcgtgaagaccacgagcagcttcgaagaccacgagcagcttcgaagaccacgagcagcttcgaggaccacgagctgcttcgaagaccacgagccgcttcgaacggagatcgactggcaacgtcaaggagaccacgagcagcttcgaagattaagtgcagcttcggacgaagagcgagtggcaacgtcaaggagaccacgagcagcttcgaagattaagtgcagcttcggacgaagagcgagtggcaacgacacggaggcaaagagcagcttcggagagggaccgactaacgaatgaccaagacaacggctatcgctcgaaggacgacaacggatccagatcagatatgatggcacgcagcagtagcacagcgacgatcaagcggatgggtggctcatggcaacgagcaccagcagctcgttaccatcgaggacgatggtacgttggagggagagagtaatagtgagtggtatttgcggggcgaccaattcccgaggacatcatggacgcgagcagcagctacgacatggacgaccaagacagcaagtacgacaacttcaacttcaacgagatcttcaaggggtacacatagatgacacacaactcctacacgagcgactgtgtggtggagagcgtgcgcggtgaagaggcggccaagccgcacccacaatccaattcttctagacttcccgacttacaatccaattctttccgcctttccaagatctcaagacttccagaccaagacacagcagtagcacgagctgccgcaccgaccagcacggcggctagagacaaggactgattgctaataaaagttggggctacgcgagtggctccggcgcggggacgtaagttgagtcctctgctgccatcgagtgttgacgtctttggtgtgtgagcatgtgaagagaacaaatgaacaacgagctatacgacctgagcaagcgagtactgtgcagaataagccctctgcttactatgcaatgaaatgaaatttgcggttatgacggctgactacgcccgtcgccgcgcactgctgcagcgccgcatacggggactccccagtagcagtccaatagtgtgagttcacgtagatccgctacggcagattgagcggcgtaagccatccagcaaattgacgcatgatatttcacagtacaaaaataagagcaagcgctaaaattcaagaacgttttcatgcaatgctcttctgcggcaagcatagcgctactacatagtactactagtagtaaataaagttttctactgtgcaggttttggaataagcttacagtaaaaaaaagaccgaactgcgaacacctgggctttggcccgcaaaccagtaccccagctgtcctttttgtgatatcacggagggaagccgatcaacgattgccattttcgagactagggcttcgcgggggctgagatagcgaaaataaaacagaacagatatacgcacagcgcacacgacttaggcgcgccgcacttgcggcgcaccagtcgttcgcgctgtgcgtattatattatgagcatccacaactaccagaaaagcagcttcttagtgcaataacccacttgcgataatatcaatttactttcttacctccgcgctgttaataatcaaatacaagcaagctattagctgcaacagcgccctggcaagcacttacattcgtgctgtaacttcgtcctggtgttgcgtcttcgggtcgggcgtgagaatgggaaatggttcgaatgaaacttgatgatgcgattgatgcttcctcaccgatagagaccaactagataattatttacatgacctattaagtttactttcataaagtttcaatatatgatggatacttaaacaggtgcgatacacgcacggtttcatgcgacaccgatttaatcctgtgccggctgcgtagcagcataccttacggtacacatgctatctcagtaaaattctctcgatttgagaacatcaatacgacacaatgacatttgttgaaatctggcacattggtatttagaaaacgacggtggttgttttgaacccgtgtgctgttctggtcggaggccgacgtgtataatgttctttttttcggcatggttgttttgaatcgagcatttgggcagaacgacccggaaatggtgtacatcgtgttatactacatgcaaccagagcactcaacttaataatacttcctccatctgcgttaaagctcccaattcgacctgctcattcactcatgactcataagaatatttcgacgtaccctcctcttgtgcaggtgttagacaggttcattgaaaatgccatctgaatttgtcgtgttataaatcgtcgagaggccggtattgtgtgaatccccatactcattggaatgagtcttggtaggtcacatttaacattccactaaggtttcaccgaaaactacttctactttttaatattaaataataagaaaaactatttaaatagttttttaaaaatagtttttaaggttgaagatgggtgcggtttttctactatctactttataattttgaaattgccatatgggactattttcgacgcaaaaaaatatctactgtaaaaactgtaattatgccccgtggggtattgcagcagtacccctcctgccaacctggggcattattacaaggggggcactattaaagggaatgcggcaccaaaaataactaccgtttaaaagtctatttacagaataaatttgacagtaatcgctgacattggtaagtgaacatacaaacctaaagattatgatgtgaaatatttggagtttatgagggaaaaaaatcaaactcaatttctcataaaaggttggagtggggctctatttgagggtggagcactatcgcaagtccccagccaaagacgtcaaatttcatggggtggggcactattagagggagggggcataattacagtttttacagtagttcaaagttaaaatgactaccccaaataaattttcgactagctacttttcagttttcctgggtttacgaccgcgtgctacgcacggccggaagcagcgacagatgcagtggtttcttcacaaaagaagcggcgtcggagagaggaagatgtcggtggacgaagagaccaagggtggcgatgagcagccaccaatacagcagcaacgacggcaagaagctgatgtcgcacgtcaagcgcgcgcatcgtgtcggcagcttgtgcgtgacgagcaggaaggggcaggagcagcgaagactagtgggcttcacggtggtcaagaagccgtcggcggtgacgaacacgggcaaggaggacacgcacaagaattacgtgcacaccagcagcgagacgaaggtgatcaagatggagatgcgggccgaagcggtggtgatggcgaccgagcagccgtggagatgctacgaggcagaggtcggcctcggcgttccgtacccatgcccgagttgttgcaaatgcccaccgcagggtacatcgtggaggttgcgcgacgacgagtgcgtaatcgtgccggcaggtacgagatggagcatgaagtatagtatggagttcggcgggctggaccatcggaacggaggtggctgtcggcagcggagttcgaggagttgctcgacgcccgcaagatcgaggacgatcttggagccgcagatggcgtgtagtgtggtggctcgtccctcctctgaagaacacgagcaggatctgcggaacagcgtccaagtggtgatcgacttgacgtagtagctggtgtggcataccgagcggcagttggtgacgacggcgagcggtgacggaagcgacccagtgggctaccgttgcgtgcgacaggaggtagcagttgaagttgacggctgcagaagatcgcaaggcgaggtgacctgcgaaccagacagagaacgagtatgcagagaggagaggcgacgtcggagagcgagtgtgaggccaggaggccacgaggaaggagatgagggcccgagagggagaggtcaaagtaggctagaaggcgccgagtggacaggatagggtagatcgacgggggttagaagtaagtgggggcaacgagctgcggtgtggcagctcgacccttagatgcgatttgttgctggatagtaacgagtcaagacttgtaatacactcagttgcgccgaaacgcgggttcctgtggcctagtaccaggaacgtgtcttgcgaccagggaagtgtcggctagacacaggagtaagtggcataaggtaagcgatagtggcgggtggtgcacagatgagggcgatgtattgagtagggtggcgggaccacggagagaagccgtgggggcgcgaggtgcactcctgacagcaccttggccgtgaaggacagccgtttcaagtgcttgggcgtgcccaagtactgtgacggagatgctgtttgcatgtccggtgggagtcgcctgtggcttgccggagcccaggccgattgtatttcccctcccagccgtccctatccccgatatgcttggtgaaggggccagtacctgtctggttgatcgtcgtactgcctcgcaactgctggcagtcggccctatactggttcaactaggcgtgaacgcgacaacgacaacggtgtaagtttgtaaaggtggacgcgtgcaatactatgggcaaccgggctagacgggacctggttacctgtggtggacgcggaacactacgggtggtcgggctggacgggacctggctacctgtagtaagggacgaccgggctggggatagacccgggaacttcctacaaaatcatccaaattcgggtgctacttatttttgaggatcttttgttctaacttctgtgaaagacttgcaaagtctgaattctgaggaaactcctaacttctgagtgcctacgtaatgaggggcgctcccgggccctgggagaaatctaaagattcaccaagtcggtcaacttgttttgacatccatttttcaaatatctcgttctccataaccacaacgaagtagagtgaaaggagtggatattcaagtagagaaaatgcaagaaagcgacgggatgtaggttaggtgccttcatgcgaagaaatgaagaagttatagtgaatctcctgagtgcgggaaaaagaatcagccttggtacacagtattttgaaagtgcagcttagaaataattctatttttattagtccactccttaaaatatgactggtactacaactaatgtttgtttaagttacataaaattgtaaaaacagaacgcttacaattttacttgacgacttgtgtcctacgagtataagcttcccgtgaccgtttgctgaaattacgtcaatagggacacggagcacgcctgtaagcgcaatagagaacaggggtttgggacgttcgcgctcattagaaaacagtagcgcgccgcaagcgcatgaggtctttcagccaaatctggaagcacaccttcggtgtgcttctatatagctttttataggttttttctaagttgtcttcggaaacttagtggacgaaaatggcgaaataacaagaacttttataaacagtttcacgtttctaaataggggtagtgcgggacgcgccatacaaaagtccagtgagagggtatttttgacgaaaaatcagaacgtgtaccgatagaaatgctccagcccgcttatgcttccggtcttggctggaagaataatatactgattcgacaaggctacacaaatagtggttgggttctgtaagaccttgtacgattgcagcagcacgcagttgtaagtgtagctacccggctaaccgctacaaataagacatcatacggattgcctttcgatatgtatacctggttttaggaagcaacttaagagtaatgttgtggcaccgacagcccaacagtgtttagagccaacattgaaacaaccttattgccagcattcgcttagagactaggaccctgatttactgtccaaaatgccccccccccaaacggtactgagctcattgaaaccttatactacaaatgtattctactgtttgtgacgccccatagggggggggcaaacagagatcaaggtggaagcggtgaaaacatcgctaaaccatgtgacactccaccttctttagatttaagctcaaagttaaacttaagctaccagatgctacaacccttggttcacctttgccacagtcttcactgctatatcagttaatcggctttcatactctgctaatgtcatggcaaagcacaggtccgatattagctaggtctcttacttcaagtcttatctaccatatctgatctcgttcctacactttaacagtcgtgtaacttgattttgatttgaattttatcgcagctgctaacacgtagaaagtttgttatctagacattagcatgctttagtcagacgcattatcttgccttatgtttatgttcttatttctcacattcctacacttgtcgggcttgattttgctttgaacttatcgcagctgctatgtaacatttcttgttcgacacttactgggataaatatagattgtcgcgtgtgcagctgcctgggggaatcctcttcccttggtgagacctcttggttgttatcgctcattccgccactgtcggcaccgaggcattctctttctcggttacgggcgatttggcttgggttttgcagttattgtggtaaattaagaactgattcaagaaagcaaaaacgaaacgaaagtggccgacgcgggtccgggtccgcagcatagccgtgatcaaaagaaccgtcaagggggtcgtagagtgaggaacacacgcctcccacggcccaagtcggtgctaagacaagcgttctagcggccgagccaagtgaagtggagtgaggatgcttcatggcagtctcgtcactcttcgtttccgagaccatcgccgaggtgttcgtgctcgtcaagtgctccatctcggattaaaggcgccttcctcacgtgcgtcaccattgcgctcttctgaacgcacgctctgtggggtctcgagatgatggcgtgttcgatctgttcccgtcttcgcgtcggtccatggttatctacgtgttcgaaggcgtgtcgatgccgattgttatgaatgtggtgcgagacaagtggtgtccgaactgtggcacgatggaggacgacggtgacgcagcgcttaacccgctgagcaatgaggacgaggacggactcaagagcataatgctgcttaccgtgctggggatggtctgggctgtgatcctctgggggttggcagtccaaagacggcgaaggaagggaggcttcgtgtgcacggcactcagcaaagatctaatggtggattcaatacatggtacgtagtatgagtcaaagttggtcatagttgtaaggaacatggtgcgttgcgcacttactacacactcgacattaatttacctgtcgaacttgtcgctcctggtggtgttgttcgccgccagatatacatcagggttcatcgcggcgctactaatgatgaagcttacaataccgagctgatagtacgtgataaccgtattaatgcagtgcgtgtcttcgtcaacgcggttgatagacttgggcatgtagaaccagctgccatgatgaagcacagcgtgccgacaaacgtcccgatcgccgggagcttcccccagctgaacaggttcgagactcggaagaccgagtcgtgtggttcctcattggaagaagataccggcaagagcagcgaggcagaagaggatgcatccgatgatgaaggcccaaaacccgagctacggcgctttgacgtaccaggacgggaagaaaaaaagtcccacaggatgaagatggacgtggaatgtagttgaactgcgcggcgaacgcgcgcagcgacgtgtggtatgaagtcgaggttgacgccgatccagaagaccgcgcagccgacaacgaagttccaacttcagatgagctcgcccttgtcatcccaccacagaaaccagggtggcgtctagctcttaaacgcctaatacgcccctacagcaccctaattggtgtctaaaacgttaccagaggtcgacagcatcgatgacccataaggtcctaattgccaatgttttcgcgttcagccaccgccacctcgttgcgagctcctgtcggcgccttcgatgctttaaggactgcagacgtgagcgctcctaccagcccggtcggcgctccgctgctgtgggcgctttaagcccaggtgacgcgacctccccagaggccacgacagacccgagattcgctgcgcatccacgcaaaggaggtcgttccagtcgcccgccgccgctggaaattccgttctacggtacggacccggataagcccgaccctgcccgggggctcctattcaagttggccagggagctcaatggcgcaatctggcagttcgtgcagcggggctgccgtaggtttgcgtcagaggaagcttaacagactcacagactcacagagtctcagcttaagatagcccgttctaataccagaacgtacgagtccgtacacctaacgggctccaagagtcaacccttaactcttaactgtgtgaatctcaaactgattgtatttccctttattgcggcaaagccgcctacagtgtaaatctatccggttcactatctagcatagtgaaccctagttatatgcataatcagtggctctgaagccatgtactgattcttctattgatttaggttagacagtgtgtacccacttcgtaacccgtcgggtaactctcgtgtaaccccgttacagttcgcgttcctggtggcagctcaagcaacggtagaaaatcatgttctcggcgatggcgacgcccaccacattcggtgcataagctgccacttgggcatcgacctgaacaagaacaggcacgacaggacccgtctactcgccaagcacatggagctctagcaccgtgcagaggtggcggcgtacgacgaagccttcggagcaaaacccaagctcgccaagaagcggaagacgtcgcgcgcgctagacgggtccgaaggtgaagacatttcattcgttagcatggtagatgaagcttaccatcccaccactacagcaagtttgcagcaactctcggtttccgcagcgccgatccagcaagcccaagcctcggacccagcatcaacagttccctcccagcaagcctcggccacggcagctccgttccagcaaggctcgactccagcatcggcagctttcctgtcaggcccatgatacagagaaaatgagctggaagagggatctgcactggtctcaccgccgggcgatagactcagcaccagacagggagatgctggagcagctcggcgcagcgctgcctacttgtggtaacctgcgcgttctcgacatctgcgcgggcagtggacgtggagccgccgaggtgttgaagacataccacaccgctcgcgtggagttgttggactcgtctcgtgtctgtctcgacctcgcccggggcctcctggaccagttgcaaacgtggccagctacacttccgcggttcaccgagagtcaactgcgggtgtcggatcctttcacggatgattcggtcgatgttattgtcgctgctggcgcgttcgaccctctcgtggagcaggcaactggagtttaaagctacgtcgcgttccagagtgcatttcaacaggccatgctgagtctgcgccctggcggctatactgtcattggcttaccttttcgctgtaacttcgtcctggtgttgcgtcttcgggtcgggcgtgagaatgggaaatgattcaaatgaaacttgatgatgcgattgatggctcaccatcggtagagaccgactagataattattcagatgacctattaagtgtactttcataagtttctagcaaaataactggcaagacgaacacggccaacaatagtctttttgctgtccatacagtttttgtaagataagtttatttaaccaaaatattttatccatgcgttgccaaacgcacaccacatatacagatagttttatttgaccacatgcgttgctgctatgcatgccccccctccacacacacacatacagagagagactacataagtttgcaccgtacccttgtctttttgccaatattttaacaaagtatttgtgaacatagggagcagtcatggcaacaaaagtccagataccaacaacactgttaatcgttacccccccccccccccccccccccgacctcccccaaaaaattttatcgcgagaaaaaaatcattaaaaatatgtttatgattgtagccatgttgcacttgacttgacgtttctatggagtcgtgaataacaaaaaaaaagtataaacaggttttgaccgtgtttagtctagaggtccaaaataaaacaaagttcgattttggaatttttccccttttcccctacagtgttgaattttcaacactgtaggggaaaggggaaaaattttagctctgaaaactaatcggaatttgttgtttttctaattaattaatggaattgtttagctctgaaataatttttaaattttgtagctgtagctgggtttgctggtatataattacttaatgcatcaatctggcacactgagcgtcactgcaacgcaccgcactgatagctcgccgattgcatcaacggcgggcattgtcattgaaaattttccctccctgcaagccttggtggaccggtggcacccgttgcccgcttgcgtgaacgttccagcggaaccttccgttgtcgagatcggagtaccgtatgttgaagggcgggcaacgcgcgtcggcgattggccgaaacgcggagtctggtccaatttcctttcatggatacgcgcgctgccagatcgaactgtcagtcctcaactcgctcggtgtttgtggcacttgcgcatacaatccccaagtgcaaccagcggccatgagctacagcggcggaggcggtggctacggcgaccagcgcggctacgaccagcgccgctacgacgaccgtccgggcagcagcggcagcggcggcggagggtatggcgaccagcgcggccagcagcaagggtacgaccagcgcggccaggggtacgatcaacgaggagggtacgaccagcgcggcgggggcgactacagctcgcgctcgtcgggctacgacgactacagtcgcggaggaggaggaggcggcggtggctacggcggcggcggctcgcgtggctatgaaggaagtcgcggcgactacggctcgggcagcgggagctacggcagcgctggctacgacgatcgcagcagaggaggctatgggggctctggatacgacgaccgaggcgggtatggcggctctacgggctacggaggcggaggctcctccagctacgacagtcgcggcgggtatggaggatcaagctacgaccagagccgcagtgccggctacgggggaggaggcggcagctacagcagtggaggcggcgggtatgatgaccgctcgcgtggatatggcggtggaagcggcggcggttacgatgaccgctcgcgcggtggatatggcggacgggacgaccgaggatacggcgcaagcagtggcggacgggacgaccgaggatacggcggcggcggtggcgaccgaggatacggcgcaagcactggcggtggtgaccgcgggtatggcgcaagtagcggtggagaccgagggtatggaggtggtggcggtcgtgaagagcgtggctacggcgggggaggcggcggcggccgagaggaccgcggctatggaggcggcggcgatcgaggtggagatcgcggatacggacgccgtgacgatcgtggaggagaccgtggaggggaccgaggaggagaccgtcgcggtggagatcgcggtggagatcgtggaggcgaccgcggatatggtggtggaggacgcggtggaggtcgcttcggaggaggcggcggacgcggtggaggccgtggagaagctggccccggggttggcactgtcagtggctccggctatgagaacatcggcgcgcccgtggctgacccgcgtctccaggaagagtggacgggtcgcgccggcgtgcgcgacgtgcgggcggacgacccggatctccagcaggagttcctcatctgccgccgcccgaatgtggcgaaggggggcaagtccatgcagctccaggtcaactacttcggagtatcgctcgactcactgcctggagagatcttcaagtaccacgtggatgtcgagcgctcgccggacctcgctgcagactccaagtacggcccgtccggtgctgatcagaaggacgaaaccatgggcgacgagccgaagcaggagggtaaggacgagaaggaggacaaggacgtggagatgagcgacgtgtcggccgctccgaagcgcgagcagcgtccggaacgccccctgccgcgctcgctcgtgcgcaacgtgatcaacgctgctctccgacagtacgaatccgagttcgggggcattcgcgtcgtccacgatggtatgtctgcgatgtacgcgcctgccattttgccgtgggatgcacactccaagaccttcgtcgacattaacccggacggtcccagtccgacacccgcgcctgcacccccagccgctggtgaagcgcctcgccgtccattccgaggcccccgcacgttcgtcgtgaagatcaagctggctgagacgatcgccaccagctcactgacggactactactcgaatccggatgtgaacgtgatgccggttctccaggccctggatgtggccgcgcgtcacctgggagctcagcgattgatcgctgtgggtcgcaacttcttctccatgaagaagacgtttccgctcaagggcggcaaggagctgtgctggggctaccaccaggctatccgcattgcggatcgtaaggtgctcatgaacgtggaccaagcagcaacggtgttctacgccccgaaggagctgatggagcttgtgctagctgcactgaacgcgcgctcgccgaacgacattcgtggactgtcggaccgagatggaaagaacctagcgcgtgcgctgcgcaagatcgaagtcgtccctactcaccgcaaggatcgcaagcgtgccatcttcggcatcagtgcgcagcctgccaaccagacgattgtgagcatcaagggcgagtcgatgtctgtggctgactacttcagcaagcggtacaacatgaacctgaggtaccctcagttgcctttggtgaacgtgggcagtaagcgcccgggcaaggagaactggctgcctattgagctctgcgaagtggcgccgggacagcgctgcccgaatatcaacgagctggacactgcagagatcatccgacaaaccagtcagaacccgcgcactcgccaggaaaatatcattgaccaagttcgccaggctgggttcgagaacgacccatacctggatgcgttcggcatcaaggtggagcagcgtctggaatcgacggacgcccgtgtgatggatccccctgacgtgcagtacgctaatgtatcggagcggccgtcgggcggccaatggaacttgcgtgataagcgcttcgttgagggtgctactatgcgcaactggggtgtcgtgatcactgccaatgtcggagagcgcgacgtccaaggtttcattcgcaacatggtggatatggctggcaagagcggactgacgattgaggacagcaacccagtcataattcacatggatagtttccgtggtgctcaggtcgaggagctcatgcaaacgtgcttcaaggagttggagtcgcgcaacagaggccctccgcagctcatcatggtgatcaagcaagataagagcgttggatcctacggtgacattaagcgcatgtctgatacggtgctgggaatccccagtcagtgcatcgtttcccagaacgttcgcaacgcgaagccgcagtactgcgccaacgtctgcctgaagatcaacatgaagttgagtggaaagaactcgattctgcgcgagtcgttgccgctggtgagcgacgcgccaacgatcatcatcggtgctgatgtggagcaccctcgctcgggcatggggtcgcggccgtcgattgcctcggttgttgcgtcgctcgatcgttactcggccaagtacgtcgcgcgtgtggctgcgcagaaggcttcgagtgacatccagctcctgccgcacatgctgcgcgacttgttcttggcgtactaccagagcacgaaccgcaagccggagcacgtgatctactaccgtgacggtgtcagcgaggggcagttctacgacatcttgcagacggagatgcgtgcgctgcgcaaggccttcaagatgatctcggacggctacaacccgccggtgaccttcatcattgtgaacaagcggcaccacatgcgcgcgttcccgatcaacccgcgcgacgctgatcgcaagggcaacgtggtgcccggcactgtgatcgacacggggatcgtcgactcgcaccgcttcgacttcttcttgtacggccacagcggtatccagggcacgagcgtcccgtgccactacacggtgctgcacgacgagaacaagctgtcggcggaagacgtgcagcgcctcacgtaccatctcgggtacacgtttgcaaggtgcacgcgctcggtgtcgttcgcgacgccggcgtactacgcgcatttggctgcgggtcgcgcgcgctttttcctgaacgagggctcggacggtgcatccacggtgggctcgttcaactcgagctcgtccaacttcgacttcacggagctgcacaacgacctcaagaactgcatgtttttcatttaggcgcggcaagtgtgagggatgccgctggaaattacgacgctggaagggagactcgatccgagggatggagacgatgaacagtaagtggacaggctgactcgtgccacctaacaaagagattggaatgaatgaataaggattgaattgactatcgatgtgatattgcgtgtgattgattcctttggcctagcgttatcgggtggattaccatgttgagtgatcagaggtggtcgaaggcttcagtctgcttgcctcattctccaagactcgccctcgagatgactgtcaagaccgtgttgatcactggaagcaaccgtggcatcggcctggccttcaccaagcactatgtggacagcggctggaaggttttcgccgctgctcgggacccacaaactgccagcgaggtgcgttgactgactcactcgggccttgaatggattcctggtctgatctcagcatgttttgccgtgtaaacagctcaaggagctcaagctggagaagattattcaggtcgatacaagtgatgaggactccatcattgctactgctgagcagctcaaggacgagcccattggcttgctgatcgacaacgccggcatcggggggcgagacggactcgacacgaccactaaggatgatgaagcagttcgaagtcaataccatcggcccattccttatgacacgcgcgttcctgcccaatctcaagctcgtagcagcgaagagcggctcggccaaggttgttcacgtttcgtctcgcatgggaagcatcgcatgcactgatatcggcggtctgttcggatatcgagcttcgaaggtggcgctcaacatggtgacctcgcgcatgacctgaagaaggaagagattattgcgctggtgctgagccccgacacccgcatgaccgagcacaaggggcaaaccagtccggaggaaagcgcggaggggatggcgaaggtcatcgcaaaggcgactatagaagatacaaggatggttgaagctttagagtcaaacgctcatcgcagctgactcttactacaaactgaagccacaccaagtcgcgtagcttcggtggccgagtcttcgtcgtggccaccgctaccacgacgacatcaagctcatggtcgagacgggtctgcagtccttccggttctccacgtcgtggtcgcgcgccatgacctgggacccggaaacgcgtcgaatgcgccccaacccgcccggactcgcgttctaccactcggtcatcgatgaactgaacgccaacggcatcacccccatcctgacgctgcaccactacgacctgcccctggccctgcagaccgagctcgaccctcaggcgtggctcaaccccgacatctccagccacttcgatgactacgcggcgctcatgtttaacgagttcggaagcaaggtcaacttctggactacgttcaatgaaccgctcggcttggtgggctatgcgtacggcatggggttccccaacatgcctccggcccgcagaggatcccccacggaggcgtacgaggtgtcaaaaggagttctcatgtgccacgcgaaggctgtcaagacgttccgggagctgagagaggctggtgtggtggcctcgggcgctcgcattagcatggtgctggtctccagctacttctacccgctcgacgagtccaaccccaaggatgtcgccgccgctcaaagagcaatggactttgacatgggctggttcctgcagccgctcctcacgggcgactaccccgccatcatgcgtgagattgccggtgaccgtcttcctcgcttcacggccgaggaatccgctctcctgaagggatcgtacgacatgttccaactcaaccactactcgagccaagccgtgacttcctgtgattccccgacgtcgacggtggactgcgcgtcgctagctccgggctggcaggcggacaagggcgtggacgactcgcacattatccccgggacgctgcacccgaagccggaccgcttcggcaacaactactgcgcgaacctgttcaccccgtacccgccgggatacctggccatgatcaagtacatgcacgcgcatgacccgaccgtcgacatcttgctgacggagaacggctggtgtggcaacgatgagatcgagaacatggaccaagtccacttcttcgaggcgttcgtggagcaggtgcacaaggctgtggtcgaggagaaactccccgtcattgggtacacggcctggtccttcctggacaacttcgagtggggctcctacaagcctcgcttcggcctctactacgtcaactggacgagcgagacgggctcgcccgatttcaacaaccccaagccgaccgacctcgctcgcatcccgcgtccgtcggccaggtggttccaaaagctctccacctccaggtgcctcgacaaggtcagcaccagtagcaccatactggcttttgaggaaccgacgaaggatatcaccgagttgttcggagctcctctggtcatgcttggcgttgtggcgctcgttcttctggtggggatcaagacgcaacagcgcagtcagaacgacgaacgcaccccgctcgtgtcggcgaattgatcagtctaacaaccaaagtcgctacatatcggcatgaacatgtatgcttgcaatacaacaaccgcttgtccgttgacagactccatgcaatgcaatgcatggattaactggttaggaaaactcgacaaagttaacatcgtgggagaccgttcatagttgcagaagtactgaagcctacagcaagcgagttgcttcgttggccgagccttcatcgtggccacggaagtggcgccagaggcggcgaccgaagaggaagaccagcacaaccaccgccacgaaggccgcagcagcgaacgccacgatgccgaacagccaacgccacacatggcgactgtgaccggtactctcgggtgtcgtcgcagtggtcgcagcagcctccttctccactcccagacacttggtcgacgccaccttctggaaccacttggccgacggacgcgggatccgagcgaggtcggtcggcttgggctcgtagaagtcgggtgagcccgactcggacgtgtaattgacgtagtagaggccgaagcgcgactcgtaagacccccactcgtagttgtcgaggaaggaccaggccgtgtagccgatgacggggatgtgttcctccgtgatggccttgtgcacttggtccaggtaggcttggaagtaccaaagctggtcctggctgtcgatctcgtcgtctccgcaccatccgttctcggtgagcaggatgtcggcggaggtgtcgtgcttgtggagccacttgatggtctcgaggtagccaggcgggtaggcagtgaaggacgcacagtgcgagtctttcagagccttttgactgcgctctctggtacccggtacaatgtgtgaatcgtcgattcctcggtcttgctcaaagccaactgatagagtatcacagtccttgttagaagacttggagttgcagcttgtaacctggcgagatccgtaatggttgagcatgaggagatcgtacgatcccttgagtagctccgactggtctccgtagaactgaggcagtctgtcgccaacgatctcgcgcatgacaggggggtagtccccagacacaataggcgagaggaaccagcccacgtcgaactccattttcctctcggctgctgcgacatcggcagggtccgtcgggtccaagggatacgcgaagtccgcgttcagcacaataccgatccgagtcttgtcgccgaccacgttgttgctcttgagctcccggaacttcttcaccgcttgcgcgtgtgacagcagcacattgtgcgtcgccgtgtacgcctgcgtcttcgatccagtgtagcctggagcccccatgcccagcgcgtagccaccggcagagaaggacagcggctcgttgaaggttgtccagtagttgaccttcttgccgtactcgttgaacaggagcgtggcgtactcgacgtagtggtcgatgatctccgtgtccagccagccttcttcccttaactgagtgtgcagttcaatgggcaggtcccagtggtaaatggtcaggatcggcacgatgccgttcgacttgagctcgtcgatgagcgcgtggtagaacgcgatgccctccgggttggggcgcatacgagccgtgtgggcgtcccagttcatgacgcgcgaccaggagacggagaagcggaagctctgcagccccgtgtccaccatgagcttcacgtcgtccttgtagcggtggtagaagtcgtcggccacgttggcgcacttgagccctggctgcgtgcggcagtactcatcccagatgctgggcgtgcggcctccttccttcacggcgccttccacttggtacgaggccgtggccgacccgaagaggaaatcctcggggaagcagcgcgaatcggctgcggccacagccacagcggccgaagcggccaggcccagcaactggaggactcgggcagcgagacgcatgatggcgagcgaatccggcaatggcggtcaaagtctgatcatagaatcacacctacccctgactcaggcgtggatagtactgagatttgtataggccaagttgaagttgtaccgtatttcacttctacagtaacgtctaaatcaatcgtactgtaccccaagccaaagcaaagtgcttcgtgcaacaccacttcgctccggtggctaaggttttccacctggaagcctctgtcgtttgtattgccggtacagtacatgtattgtcgcgctgagccaacttgaaggtgcagcctgcgcaacttcaacggcacgtgcgccactcatcattgttgcggccgggaatcttgcacaggcgccatgcattgctgcaattccgtcaagcgtgacaagcttcgtgagtctgtagctgtaagatgcagaggcttctccatctgatcggaagcgcggcggcggcgctggcgctgctggcgacgacggattccgtctccgctgcggacccgcgatgcttctccgacgacttcctcttcgggtcggccaccgccgcctaccaagtcgaaggagcggtgaaggaaggaggccgcacgccgagcatctgggaccagttctgccgcgagcgtccgggcgtgaaatgcgccaacgtggccgacgacttctaccaccgctacaaggacgacatccagctcatggtcaagacggggctgcagtccttccgcttctccatctcgtggtcgcgcgtcatgaactgggactcggcgctgtacggcatgcggcccaacccggagggcatcgcgttctaccactcgctcatcgacgagctgaacgccaacggcatccagcccattctgacgctgtatcactgggacctgccgctggagctgcacacagagctgtctccccaaggctggctcaactcggacatcgtccaacacttcgccgagttcgccaccctcatgttccacgagtacgggagcaaggtgaacctctggacgacgttcaacgagccgctgtccttcacgacagccggatacgccaccggcagggaggcgcccggcttcaccggctcgccgactcaagtgtacacggccacacacaacgtgctgctgtcccatgcccaggcggtccagcagttccgagagctcaaagacactgaagtcatcaacgacaaggctcgcatcgccatcgtgctcaacgcggactacgcgtatcctctcgatgagtcgaacgctgccgacgttgaggccgcctcgcgcaagatggagttcgacgtgggctggttcctctcgccgatcgtctcgggcgactacccgccggttatgcgcgaggttgtgggcgatcgactgccccgcttcacaccggaagagtccgagctcttgacgggatcgtacgatctcttcatgctcaaccattactcgactcgcgccgctactttctgtggctcgagtgcttccaagacggagtgcgataagcttgcggtgggctggcagcgcgaccgcggggttgacatctcccagaccgtcccaggtaccagagagcgcagtcaaaaggctctgaaagactcgcactgtgcgtccttcactgcctacccgcctggctacctcgagaccatcaagtggctccacaagcacgacacctccgccgacatcctgctcaccgagaacggatggtgcggagacgacgagatcgacaaccaggaccagctttggtacttccaagcctacctggaccaagtgcacaaggccatcacggaggaacacatccccgtcatcggctacacggcctggtccttcctcgacaactacgagtgggggtcttacgagtcgcgcttcggcctctactacgtcaattacacgtccgagtcgggctcacccgacttctacgagcccaagccgaccgacctcgctcggatcccgcgtccgtcggccaagtggttccagaaggtggcgtcgaccaagtgtctgggagtggagaaggaggctgctgcgaccactgcgacgacacccgagagtaccggtcacagtcgccatgtgtggcgttggctgttcggcatcgtggcgttcgctgctgcggccttcgtggcggtggttgtgctggtcttcctcttcggtcgccgcctctggcgccacttccgtggccacgatgaaggctcggccaacgaagcaactcgcttgctgtaggcttcagtacttctgcaactatgaacggtctcccacgatgttaactttgtcgagttttcctaaccagttaatccatgcattgcattgcatggagtctgtcaacggacaagcggttgttgtattgcaagcatacatgttcatgccgatatgtagcgactttggttgttagactgatcaattcgccgacacgagcggggtgcgttcgtcgttctgactgcgctgttgcgtcttgatccccaccagaagaacgagcgccacaacgccaagcatgaccagaggagctccgaacaactcggtgatatccttcgtcggttcctcaaaagccagtatggtgctactggtgctgaccttgtcgaggcacctggaggtggagagcttttggaaccacctggccgacggacgcgggatgcgagcgaggtcggtcggcttggggttgttgaaatcgggcgagcccgtctcgctcgtccagttgacgtagtagaggccgaagcgaggcttgtaggagccccactcgaagttgtccaggaaggaccaggccgtgtacccaatgacggggagtttctcctcgaccacagccttgtgcacctgctccacgaacgcctcgaagaagtggacttggtccatgttctcgatctcatcgttgccacaccagccgttctccgtcagcaagatgtcgacggtcgggtcatgcgcgtgcatgtacttgatcatggccaggtatcccggcgggtacggggtgaacaggttcgcgcagtagttgttgccgaagcggtccggcttcgggtgcagcgtcccggggataatgtgcgagtcgtccacgcccttgtccgcctgccagcccggagctagcgacgcgcagtccaccgtcgacgtcggggaatcacaggaagtcacggcttggctcgagtagtggttgagttggaacatgtcgtacgatcccttcaggagagcggattcctcggccgtgaagcgaggaagacggtcaccggcaatctcacgcatgatggcggggtagtcgcccgtgaggagcggctgcaggaaccagcccatgtcaaagtccattgctctttgagcggcggcgacatccttggggttggactcgtcgagcgggtagaagtagctggagaccagcaccatgctaatgcgagcgcccgaggccaccacaccagcctctctcagctcccggaacgtcttgacagccttcgcgtggcacatgagaactccttttgacacctcgtacgcctccgtgggggatcctctgcgggccggaggcatgttggggaaccccatgccgtacgcatagcccaccaagccgagcggttcattgaacgtagtccagaagttgaccttgcttccgaactcgttaaacatgagcgccgcgtagtcatcgaagtggctggagatgtcggggttgagccacgcctgagggtcgagctcggtctgcagggccaggggcaggtcgtagtggtgcagcgtcaggatgggggtgatgccgttggcgttcagttcatcgatgaccgagtggtagaacgcgagtccgggcgggttggggcgcattcgacgcgtttccgggtcccaggtcatggcgcgcgaccacgacgtggagaaccggaaggactgcagacccgtctcgaccatgagcttgatgtcgtcgtggtagcggtggtagaagtcgtccgcgacgttcgcgcactcgatgcccggggtttcgcggcagtaggcgtcgtaaatgctgggcgtgcggccggactcgttccacgcgccttcgacttggtaggccgccgtggccgagccgaacatgaatccatccgggaagcagcgaggctccgcggtcacggaggacggggaggtagacagcagcaaggcggcgaggccaccggccaaacggagaccgtgctccaggatccgcatgggtgaacaacgctcagcgaattcaaaagtgagtttggtggggattctactaacgaggtgccatcaatgatcggtggatgcacacgcgtgctagtgctgcagatggttgaagtgagcaggacacaagtgaagttgaagcccctcccgtcgggaaggcacaccactacggtccctgagaaataaattcaagctgatgaagtggatgagtggtggcgaagcgggaagttgaacgaagtatggggggggtaccaggggctaatgaaaactcgattgtagtgccgtgtttgctcggcttttgcgtgctgttcctgcagttcttcgtcgtgggctgctagttagtttgacgcagcgcggggaacgcgatagtatccctggcgacgcttgagggtgatcacgactgcagttagaccaaccaccgcaatagcgacaaaggcgacccagaacccaaagccctccaccgatcgcacggtagagctgtccgcggaagcctccagctcgtcccagccgtccaggcacttggtcgtggccaccttgtggaaccatttcgcagccggacgaggaatgcgctccaagtccgtcggtttgggcttctggaagtccggtgagcccgtttcggcggtgaagttgacgtagtacagtccgaagcgagggccgtacgatccccactcgtagttgtccaggaacgaccacgcagtgtaccccaccacggggatcttctcctcgactacggccttgtgcacttgtccgacgaacgccttgtagtacttgagttggtcccagttctccacctcctggttgccgcaccatccgttctccgtcagcaaaatgtcgacgctcgggtcgtgcgagtgcaggtagcggatcatgtcgagatagccgggtgggtagcccgtgtagcggccgcagtaattgttgccgaacttgtccggacggggctgcatcgttcctggcatgacgtgatcttcgtcaacacccttgtcggcttcccacccagcggtgagcgacgagcaaggcgtcttggacgcctccgagtaacaggaagtgatggctttgctgtagtagtggttcaacataaagatttcgtacgagcccttgagcagggccgattcctccgccgtgaacttgggaagacgatctccagcacgctcacgcataacggcggggtagtcaccggtcacgattggctccaggaaccaaccaaagtcgaagtcgagcgcacgcttcgcagcggccacatcgtcctcgttgttagggtcgagaggatagaagtacgcagacacgagcacgattccgatacgagccttgtcaccgacaaccgagttcgtcttgagctcgcggaatttctggacggccttcgcgtgcgctacgaggacgttgcgggagacggtgtacgcctccgtgggggagcccttgtgcccgggggcgaacatgcccgtcccgtagctgtacccgacgaacgcgatcggctcgttgaacgtcgtccagtagtcgaccttgtggccgaactcgttgaacatgagcgtcgcgtactcgacgtagtggtcgacgatctcggggctgagccagccgttcggagtcagctcgtgcatcagcgcggcaggcaggtcccagtggtagatggtcaagatcggcacgattcctcgggcgttcatggcgtcgatcagcgcgtggtagaaggcgatgccctccgggttcggccgcatgtggcggctctccgggtcccacgtcatcgcgcgcgaccacgagatggagaagcgcagagactgcagggccacgtcctgcatcaggttcaggtcgtccgggtagcggtggtagaagtcgtcggccacgttggcgcacagcatcccgggatggtcacggcagaactcgtcccaaatgctcggagttcgacccccttcgttccacgcgccttcgacttggtaggcggcggtggccgtgccgaacatgaagtccttggggaagcagcgcggcttgggtgtggccccgacaggtgacagcactgcagtcgccaggctgcacacgaacccgaggacggaggcccacttcatgctacagtattgatggtcgccgcagcagcttcttgggggcaattgagcgaactggagaatgccggaagattttgctcacaaaacgctgagtgagcgggcagctcgctgcttcaagccacgcatatttgatggtgggtacgagctcgtgggcggcgaccttgaagcaggacaacgctgcagggatttgctagtcgcacttcaaatcatttcggtgatcgaattgggaagatcgacacacacgcaccaaggttgaagtggctacattcagtacacgccatcaatgagggcgacgcgaacgaatggccaggcacgagtccgtgcaagatgcgtggacgactacagtagcgggtgcgtgcatgtatagtactggtaagcaacgtacgaatcaagacactggcacgtggatgcaaggcagtctagctctttatattctgatagcgtgtttgcctttcaaaaatcctacgcaaaaaccacatcggaagacgcccgatttcagcgcaccggagcgacctagttgcgcgacacaagcggctcgtagccgctgcggcggtggcggaacacgagcaccaccacgacgccgatcacgacggcggcgagcgcgacgaagccgaacacaatgccgaagatggacgacttgctctcgtgcgaggcggtcgcagccttggcgtcgatctcgctccagccgtcgaggcacttggtcgtggccaccttgtggaaccacttggccgacgggcgcgggatgcgagcgaggtccgtgggcttaggctcgtagaaatcgggcgagccagtctgctccgtgaagttgacgtagtacatgccgaagcgcgggccgtacgagccccactcgtagttgtccaggaaggaccaggccgtgtagccgatgacggggatcttctcgtccacgacggccttgtacacctgctccacgaaggccttgaagtaccagagctggtccatgttgtcgacctcgtcgttgccgcaccagccgttctccgtcagcagaatgtccaccgtcgtgtcctgcgagtgcaggtagcggatcatgtcgaggtagccgggcgggtagcccgtgaacatctcgcagtaattgttgccgaagcggtcgggcttaccggggcgcgtgcccggcatgaggtggctgtcgtccacgcccttgtccgcggggtaaccaggcagcagcgtcgagcacggcgtgttcgactcgtccgagtcacaggaagtgatggcgcgactaccgtaatggttcatcataaagatttcgtatgagcccttgagcagcgcagactcctccgccgtgaacttgggaagacggtcaccggctcgctcgcgcatgaccgcggggtagtcgccgttcacgatggggttcaagaaccaaccgaaatcgaagtcgaacgcgcgcttggcagcggcaacatcattctcgttgtcggcgcgaagcgggtagtaccagttcgaaaccaggacgatgccgatgcgggccttgtcgctgatcacgtcggtggtcttcagctcgcggaacttctgcacggccttggcgtgggagatcagcacgttacgggagacggtgtacgcctgcgtgtccgatccggagtagccgggcgcgtgcatgccgaggccgtagccggcgcccacgaaggacagcggttcgttgaaggtggtccagagctgcaccttgccgccgaactcgttgaacagcagcgtcgagtactcgaggaagtggtcgacgatctccgggttgagccagcccttgggctcgagctgcgtctgcagctcgctgggcaggtcccagtggtagatggtgaggatgggggtgatgccattggcgttgatctcgtcgatgaggttgtggtaccacgcgatgccctcggcgttgggcttcatgcggcgcgtgacggggtcccagttcatggcgcgcgaccaggacacggagaagcggaaggactcgaggcccgtgtccaccatgagcttgacgtcgtccttgtagcggtggtagaagtcgtcggccacgttggcgcacttcatgccgggcttctcgcgacagaagtcgtcccagatgctcggggtgcggccgccctccttggcggcgccctcaacttggtacgaggcggtggccgagccgaacataaagctctcggggaagcagcgcggctcggacaccgacgccacggacccgaagagagccgccatggccgcgggcagcaactggcggaggaagcgcatttggtcgtggacgcgcgggggactgaagcgggagactttggtgcgcgcgagccggcaaatgacggaatggactggagcgggggtagtggggcccaaggaggaaggtcaccggagaccgacggcgagtccacgcagctttgatgcgcttgaagctcgcaagcacttcatccacacgaaaacaatgacaccagctgtattaatcgctttgtgagggctctcagttttcatttaatttgacgaggtgctaccactaaattgcatctgcaacttaacggaaggtgtttcacgaattggctgatcatcagagaccgctgtgccaggtcatgccactttttgctgcagacgagctcttggaccttgtgcattcacgcaggaggaccagaagccgcgtcgtggtagtcacgtcgaatctccattgattcgcgagcatgacactttctgctacttggccgtcacggccaaaggctgtcattctctctttcgccagcagaccaggaagaaaccacgatgaaacttctcgcagcaagtgtcaccataacggctctggtgggcttcctgccatcgactctcggttggtgggacaacggccacatgctcgtcgcggaggtggtcacacagctcatgaactcggccgatgtcgccacgatcgagagcattctcagtcgctggaacgaggacttccccaatacgggcgagatcacgacctccgccgtgtggatggacctcgtcaagtgtacatccgtgagttcgtactgccagtctcctgcttcgccctccatcacgagcatgagcgactggcactacatcgacctgccgctcaacatcaacggcgacaagtgggaggacaaggacgccgacctgtcgctcttcgacgacaccatgggcggcgacggcgtgtccgtcatcgagggcgccatgaagtccttcaagaccaccaagtccaagtgggcggccaacctcttcctgcgcaacttcatccacatcttcggcgaccttcaccagcctcttcacacagtgaccggcatcagtgaggccttccccgagggtgacggtggcggcaacagcgagtacttcgtggctccgtgcgccttcagcaacctgcacgcaatctgggatgctgccggcggcctgtacagcttgaacgactgggctctcgacatcgacgacttcaagccgacgctgcagagcaacgcttcggagctcatcgccctgttgccaaacatctcggacagcctcaacttcgcacagtacgagaacgtgacgttcagcgagttctacgcagctatggtcaccgactcagctctgcgcgaggtggtgctggagacgtacgcttacgccgactcggtcgtgtacggcggtttggacctgaatgctaccagctctggggactacccctgtccttcggacgcgtacatgtccatggcgggtaccatctcacaagagcgttgtttccggttgtttggcacacagaggcggcgtaggctgtcgttgctcttcaaatagatcatcccgcgaatgatttcgtactcttccgacgggcgaccggacttccacagcggcttgaagactgaatatttgctgtatgccttctgaaacgcccgcttcgtttggttatccagttggagtgtgcttatcaccgtgctgtcctccatcgatgctgcgttcaatctcatacgccactgtgccgtgcctacaccatgtgcccttgcggctggctgtttgacggcaagcatcacggcttgatcgcgagtcggtatgctttggagcttctccgtagccttggtacgacgcgatgccgcgtcgcgaatgttcgtgcatgtcggcgacgtcaaacacgccgtacacactgccagcggctcgggttcggtttcaccagcctccagttcctcccccggacttgaagaagcatcaggggggcgcgataacgcgtcggcgacgacattcaaagcgcctggacgatgatgcagcgtgaactggaaggacgcaaaaaagtccagccagcgagccaggcgaccagacatgcggggatgctgtagaaaccacttgcacgccgagttgtccgtgtacacttcaaacgagactccatggaggtaatggcgccaacgggtgagcgcttgtttgatcgcaaagagttccttctcgtgaacaggccagttcagctcatgcggaccaagcttcttgcttaaaaatgcaacggggagatcattgccgccatgcagctgagagaggactccaccaatgcacgcgtgactagcatccgttgtcacaatgaacggcttgtcgaagtctggcagacgtagtaccggtgcgtggtggagcgcaagcttgatggcatcgaaagcctggcgctgaccgtcatcccatacccacgccacatctttcttgaccaaagagctcagcggaagtaccagtgtcgcaaactgatgaatgaagcgacgataatatccggcgaggcccaagaagcgctgtagatccttgatgttgctaggctctgtccactcggcgatggctcgagtcttgcgagcgtccacgtgcaagccatcagctgagatggtgtggccaaggaagtcgaccgaagcttgaccaaagtcgcacttgtccggacgagcgtaaagcttgtgagcccgaaggatttcacaaacttgccgtaagcgctcgacgtgatcggccatcgaccgcgagaagatgcagatgtcgtccagataaacgaccacgaacagtagatggctcagcagcttgcgcatcaggcgcgtccacgtgcccggcatgccggccaggcccataggcgccacgttccaatgatatatctcatggtttgtcctgaatgccgtgtactgcttggacgtcggagacatacgcatctggtggtatccactggcgaggtcgagaatcgagaagatcactgctcccaccatccgatcgaagagctgctcgatgtgcggcagcggtatcatggcaacctctgaagccgcattaaccaagcgatagtcaatgacccatcgaatgggcatgtgcggattgttcgaatgtagccactccaagcgtgatgggaatttgccagtcgcgggatcctttttgggcacgccaaagatgtttgatacccatggagagtccgacacttcgatccagttctttttcagcagctctgccacaaagatgtccaatgcctcctgctcaaccttcgagagactgaagggggcgcggttgctggacgtcgcacctggtttcaagaccacttcgtgctcgattgagcggctcggtggtaatccaggcggcaactctgacggaaagacatctgcgaactcgtcaagtactgcttgaagctgcgacggcacggacttcaccttgggcgacgtcttcactgtgacattatacagttcggcgtactcgtcggccttcaccttgtctcaaactctgccgccgagaggacacacaacgacgatgcatccgtgtcgtcatcgccttcgttgtcaaagatgcgtggcaatggctgacattctagcgctgttatcgagcttggccccaaaggcatactgaagtagcctgcctttacacgagcgtcaagctgctaccgcagattcgggggcagggggtgctgaaggaactcaggtttcacttccactgaagccactgacggtcccgctacctcgagactgtcgttcaccgaactgaaatcatgcactaagcgcttgttggggaaccgcatcactccggtttgccagtcgataaccgggttgaactgcaccagccatggaagcccgaggatcacgtcttgatttgtcgacaattcccactcaatgagggaaattccgttgaagtctctgccagcaaagctgatagtctccaaacattgttgcgccgtacgggccggcgttgtcgtaccgtcaaagcgctccgccgtgatcttggtggactcaacgcagttttgggcgaggccagggcgcacaatgttgcgctctgcaccgctgtcgatcaagattcgcactgcccgcccgttcatcgccccctcgaatcgcaacagttcacgattgggtgacgactcggtggcgatggacaccatgttcaactgcaagctgtcaatgaccacgacgtggtcgtcacggctgtctacgtagtcgtcttcgtcttcgtcggatacgtcgtcttcgacaatgcggcggaacgagccctggttagcgcggaaggaccgcgcccttgtggaggacgagatacaccccaggggttgttgcgcgctggcctctttggacacgtggccaggcgatgcccgggttccttgcagtagaagcacagattactgcgcagacactcgtcgcgagaaacgaagcgcgagcttccaatctccatcggtgtcggctcctcgatgcgatgtaacgactgttgaaggcgttggccaccttgacctccgcggttcacatgggttcgacgcgatcctacagcgtgcgttcggtcgtacatcagtgcaaatgaaatcgcgtccgtcgtgtttcggaactggcgcagcttgacctcttgcctgatctctacgaccaaccccttctgaaaatgcatgaccttgtcgatatcactgatgtcctctaccttgcagatgatgtgccggaaggccgacacgtaatcttcgaggcaggcgaagttgttctgaggagctggtcgcgcaggtgctcttggcgatcgggggtcgtgaactcgctggtcagcagctcctcgaactgcgagaccgagtgcaggaagttcccgtcgtgggagacgtactcgcggtaccacgctgctgctggccccttcaagttcgccaccaagagtgacagggggcgctgctgcggtgagtcggcgccgtacttgatgttcttcgactcaaagtagagtttggcactgaagaggtagtccgcgacgtcgtcgtccttggtgctggagaacttcggcatggagatgccctcggcacggtactcgcgcgtgtcttgagaagtagagtcgggcgacggtggttgctgctgctgctgcgaggcagactgctgctgctgttgctgttgcagtgtcgccgccatctggcgctgcagctccgctgtctgcgccatgaactgctgttgctcgcgcatcatcgccgcgagcgaggcgaacatctgctgcacgctgtccgcgtgctgcatcgctgcttcatccatgtttgcgcctacgctagccacgtcgtcaaaagatggctggggcgcgcaagctcctcagctaaatcaatcaaagtttgaagtcgcaggcactccctggagcgctgcttccgacaatgtctctaagccccaacggagtcacagacgctcgacctggagctctgcttccgacaagtaccaaccacttgctccagtgtctcgaaggaagcaactggtgcaattccgtccggcgctagctcgagcccgcctcggagcacaaagactcctactactaaactcgtaacggccaccgacgcagatgttacactcggctgcgcactgtttgcaagtgacagccgaggcgacaagcggaaggtcgaggtgggcgccgcgtatggacacgcggaagtgattgggctaaatgcaccaatgagatgtcgacacgaagtgacgtgtgacaatgtgcgtcgccactcctcccccagaaagaaaaggagcgagctcggcgaaaatggaggccccgtcggcgacgagcggacgaggctgcggacgaggtcacgcacgcggcgcacccggagaagttgaacggcgagaggtacaggtgcagcacaccgaagaacggatgcgaggaagacggcgtccgcaacggcaacgcgggacggacgaggctggacggcgtgcacaccggcgacgcgtggcggcactggaactggaacgaggactggaactggaaccggaactggactgaagcgcgcgtcgacttcgcaagtgctaccaagtgtaaggttctggttgtgcttgttgtgttgcgagtaaaatggaacctgaattgatgtctttgtctgtttgctgctatccatctacacgagggcgccctcatggcgctcggtcctaaacatgaagtggttggctgaggcgtgccggagcaggagcttgcgcaaccggtgagtatgcagacgacgacttgggctctctgcgtgcggactcaactgatgatgtggttgtgttctgctcttgcacgtgcagatcattacaattggcggcaatcgcctcgctgtcgttctcaagcaattcgctgctcagctccggacactcggcctagctgactaactcgctcaaatagtgctagctctcaaggtacggaagagtataacgccacccctcaccattaagcagctcagacaactttgacaaaggatttcctcgattaaacattgcatcactatctacttcatactattgccttaaacctcgacgcttttgcgtccgtggtgagagatggagaacttgcagccgagataaatgcacgacttgagcaccgacgtcacgccttcacgcgtcaggactttgtcgctctcgtccaggagcatgtatggcttgagagacggatgcgtcttcgcagcctcgtcgaactccggaccaaagcgccagcccttggccgcgtattcagttgcccagacctcgtgcgagttttcagcgagcagatcgatgagcatcatgaggtcccatgacaggcggatgtggtccatcgggaagggaacctcgcgtgctttctgcttcgctgggcgcttgtacttcacgtgaactccaagcgctacaacgcacttgatgatctcgtccacggagcagaagttgcgacttcgggcggtgtcatcgagcgcgcgcatcggcagcatacaagggtgaagcaagcgtgcatcgtctcgaacgtcgccgtacttccagccagccaacgacttgccatgacaccagtcatagtgcatctgagctgcaacgagctctcggtgcggctggaaccactgagggagctcggtcgtcttcgtgtcgacaggattggggcggtattcctcttcaacgtggggcaacggggtgtctgcatcgccttctttcaccaagtcgcccagcgtgttatggcggatcgcggctgccatcttgaggaacctgctctggtgcaccgacaccgcactccccagctcgtgatcctcgatcgaaagcgtcggcgcctgcttgagcgcgttcacttgcttgcgcagactcttcgagtcgatgttgcggtgcgtccagcggtgctgcaggatgccttctaacgagatgcgcttctccgagtccttctccaggatcgccttgagcaagtccttggcgtcgttatcttcgcaagacgcagggaactccagcgggtcgttctcaatcttatcaaagagatcactcacgtcgctcgagtagtacgggagcgacccgaacaacagcgcgtacattgtcacgccgatcgcccaaatatcggccttaaaggcgcagtaggcatctccactgagcgactcgggggcgagaaactggtacgttcctttcgtggacttgatcatgcctcggaggtggcgcttactttcgtccgcgctgttcatcgtagaagaggaaggtgcagtggagccttgattgatatcccagagctcaatagcctcgatgtcttcttcgtcgcggagctcgccgttttcctccttaaagtagtgcgcaactccaagatcacccagtttacacagcgtgcgctcctcgttggccatcaagttctcgggtttgatatcgcggtgtgccaggttgttcaagtgaaggccctggatagcgagcacgaggttcgtcacgtacgtacggacagtgcattcttccagcaagcaagccctgccgctagcggcactcttggctcgtgaactgacgtagcagtgccgcgagccgtcccactcggcaatggcgcctccacccatgtactccatcaccaggtaatattcgcggttctcgttgtcgaggatcacgtcgtgcaggcgaatgacgtagggaagattgctggccttcttcaacagggccacttctcgtcggacgtcgtcgggtattgcgtttggctgactaatttgcactgatggtcgccgtcctgtagccacgggaatcgctcggcgattggggatgcccttggccttttgagggacgaacttcttgatcgcgaatggcttgccttgccacgtgtagagggagacaatgcccgatgcacctcgtccgagctctcgaactaacgagtacttgcccgccagcaactcgcgatcggccagccgatctgcaactccagaggtgaatccgcttgacgtcttgttgattgcagccaaccacgagctttgatctgctaacgacttggtccgaaacgcgattttggctcctccgtgagtggttacttcaaacccggtcattgaattgcttccctcttcatcgcttcctacaccactctgagcctctgaaaggggccgcgcatctgcgatgagcacgtctccaccgagcacgctgccgtacgagcctgatggttggtggttggtcgagttgcacttgatcagcgcggctttgactccgttcaggataaaccagcgctctttccacttgtcatccttgctctggtactgcaacagcccttggtgcgtcacatgacaagagctcccggagagcccgaagcacccaacctcgtgacctggagcccccatgtcagcaaaatgaagcgtagtcagttgtgagctggagctggagattgtcggaccttgctcgtcctcttagcgacgtcctcgacggagttcatgtctctgaacacgacgtcaagctcaaccaaactccagcagcacaaaaatacttcgatctcgcaggtaagaagtatcgacggagtactatcgtggggttctgagaatacctaccacattagtgtcactaccgactgccacggagctggacggagcccttgcgaataaggtattccttcagacgacgtacttggtgcatctgaactgtggtgacagcgcccttggcgtcttcaaccctcaattcatcaagcgtatcacccagtgaaaccactttcacgagtccgatgtggccatcgagtccgtgctccccataacaccagaccaattccccaggaagaacggactcgcttgcactcagcctgctcggccacgtcagcacgatcgcgcgcagattgccaatatacccacggcgaatgccacgatgcccgaacttggtatactccgccgccaactgcagtggcaggtcaatacccgagagtcccgatacaggagctatatcatctgcggaaacgagcaatgacgttgacgtcgtcgattccgcaggacttgacggtggctcttcgtcatcttgtcgaacgtcttcttccttctcttcttcctcctctccaatatctgcgtgaactatgtcatccgcctcctctgcttcttcatgagtgctatcttcttcgacgtgtgcaggctgtaccgccgaaggtgagcctccaacgcttgctgaatcggcatcatgcagctcctcgcgctgcaatgaaggtaccaaaagcagcaaaacttcttagtgagtagcctaacactcgttaacttaagcaagagaatcttcaccttcggctcagcagcgtcttgccattccactgtgtcttcatcatccgaggcagagccatccaactgattaagctttcgcttgcctccaagctggccacgcacaaacaaacgtcaatctacagtcacaccctctcaactacagccaacacacaatatccgtaccattttggcaaaaatggacgaggtcgtcttcggcgcgacactcggctacagtaccatcaacctctcggtcagttcacaacgcccgaccttcacaccaccagcactcgatcactcaccaactgcgcagttggccgaccgatgggctcttgtggggcagcttcagacgcgaaggaagaggccagtgaagagatggacgacgacgacgaacttgacgacacggacgacacctcgtcgtcctcttcatccgacgcttcgctctcaagggagggctgcaccgcctccgcctccgacgtctccacatcgtctactattgcgtccggttgcccccgcttgcccgtgtacagcgccagcttctccttccatttctagcagcaaggtggagcagaacgggtgagagacccctctctgaaccaagtgcgaccaattggacagcgcgtgccaacctgctgcagtcgtgcgacggcctcgtccgccggcaactcgctctcgtcccgataggaagaacacgcgcgacgcatcacgcgcgcatagaacgcccccagcaccgcgtcgctgctgctgctgctgctcgtctgcatgcttgtggtctgctggagcaggatacgtccgtcaaaataatttggcgattgtattcctcgagtaagtacgacgtgtagcgatgagtccaaggtgaagttgctccatgatcagcgccgtgcagcatcatttgatcgatcgccaagcagaaccaccttcacgtagtaatgcctaggctggaatagctacccaggtaccaggacggaataaaaactttattgctgcttgaggcagtgtgaagttggcgagcgcaatgaagccgaagagtttgattattttttcacgggcgagtacgactcgccggcgggagacgaccaagcatcctcatcctctggctcaaacactatcactgagacgttcgagagcttcaccacctcgccagctcctagtcgtcgttatccatctacccagccccgcttcgcatttctccgttggcgtaggcagacgatctgtgtttcctttccgcctgtttactggcggaaattctccgggacgccgttgtgcaggtcgcgcttgcgctgcaaaataacacagcagaagaacaacaaatagtcacgctaccgtctagcactacaaccaattcgcctagctcgaccaacgtacgcgttcgtcggcggccatgacgtagtagaggccgaagggcacgacgccccaggccaccatggacgtgaagaacccgctgtcgaacttgaagcgcttctccgagtctccccgccagttgttccagttctatagacacagacgcaatagagagagaggtcagtctcggtcggaggtctatttacgccttgctgttgctcgcagcctagagagcgcacacacctcgacgtgcttgttcttgtggagcgaaccgccgtggcgacgctggttctgcagctgcgcgagcgcgcgcttgggggccgccgagcggcgcagggtcgtagccagcatcgcgatgagaggtttcctgcgctgcggaccgcacaaatgccggcggccgggtccccccacggcattggctgaaacgcaatcgtttcagccaatcgcaggcgtcgagagagaccaccggaacctgcgtgatcttatcctcacccaacttgagcttgcacagtctcagtatacgatattgcaggattcatacttctcacaggtcacattccctgttaattctacctacaaaacccgttaaacacgtatgcgttctcgcaggtaagatgcttccacgcgcgctgcgtcggccctccgccttcagtccgcgttttccaccagaaggtcgcctctccccgcacacgcacacataaagccaagcatgagcctgcaggtgctgagcaagaagctggcctcgcgcgccgtggcccccacgctcgcgcgcgccgtgagcaccgagaactactcggccacgcaggcggcgctgggccgccccatctcgccgcacgtggagatctacgcgttccccgtgaccgccatctcgtccatcgccaaccgcttctcggccgtgggcatgtcgtgcgccttcgtgggcggcagcgcgctgggcttcgtgggcgccgacgtgcccgcgctcatccacctggcgcaggactcgatcccgctcttcgcgccggtctccaaggcgctcgtggccttccccgtgagctaccacctgctctgcgcggcgcgccacagcctctggacttacaagcccgagctcatcaacaacatcgacggcgccaagagcagctacgccatcttcgccgccgcgggcgtcatcacgctgggcgccaccgctatcaccatcaaggctccggaggaggagaagcccgccgccgcccagtagtttgctcatcccgagtgtctcgttgctgccggtcgcacgcgcacgcacccggggcggcgccagtggcggattagacgaacacgctggcaatggctgaatggcgcaatgactggcgggggataaaggcgtcgttcggttgttgcctgttgcggcggggtgcactctcgagaattggaagagaggcgcatgggcggcgtgcggcctgcaggacggacactttcaagaaaaccccataaaaaatgaatgaacgtaacaaaaatcaccgagcgctcttgtgtgtgttgccttccttgtcctgcgtggcggggggtgttgccctcgacgaccacggtctccgatggcttgacccatggtctcgacgcacgcgaggctgattcgcgacgccattgcacgagcccgtggtgacgcatacgcggcgtgttaaatggcgtgcgcgccgtccgaggcagcgcgcgcagtgtcgtggcaccggcgagtccaacacgggtctcgtggcgtgacttgcgtgaccgcagtatccacgcgcgagcggcactgacgatcgcctttgctgaccgaggcaaagctgaagcttgataacttgacaccaagcagcgcagcacgaccggcaccgccgcttgctgctgatgttgctcggctctgaaatggctcccctgctggcgccgatgtccaacacaagagctgcggtggtgcggtgatcgccaggcttcacatcgtgcaaatcgatcgcgctgcgcgagaaaatcaagctctggggcggcaacgtcaagatggctacgagcaccaccgcgcgcgacttgacttgaagcgcgcccgcctccagtgaagcagcggcggcggccccctcatctttgtacttgtaatagctgcgaaagaaagcacgcaacgcctaggaaaaagtttagctggacatgtattaggcgcggcatgctggattttggccgagcatggcgagctgtagtagcactgtcttggttcgaatcgccgctggcttggctggcgtgccgccgccgagaccaccatgcaagcgcgagcatgactcacccggagacgcctgcgcgcagacgcgcgccatcagatcggcgtctcaaggtccgacgaacacctcggcctctccagagtcttacgctggggaacaccgaaatgccacatgggcatcagcgctgatgacgacgccaatttttcgcccacgaagagggtgcagctctcgcaggtgagcgcacctgactgcgctggccactgacaagctcattccccaacttaacgttgaccccacaagagccttacaccgaccgcagcaatgtccaccgccgtgtaccaatacgtgtccagcatgaccccgcgcttcgcgacggaggtactgaaacccatcgcgctctcgtcgcacgcgcacttcctcagcttccagtgcggcgagtgcccgcgccagttctcgcgccgctacgcgctgcaggagcacttggccacccacacgggcgaaaagccctacgtgtgccccgctcgcgggtgcggcaagcgcttcaccaccacgagcaacctggcgcggcaccgccgcctgcacggcgacgagctccagccgctcgcgtgccccgcgccggcctgcagcaagaccttctccacgcagcacaagctgcagcgccacatgcgcgtccacatgagcgcgcccacgcgccgctgcaagttcgccaactgcaacaagacctttagctccacgggcaacttgaaccgccacatgcggaaccagcacatccgcttcggccacccgctggcgagcgaggccaagaagctggatcagtcgcccaccagcgtggacgccgatccggccagtctgttcgcgtggggcggtgatagcagcagcaatagcgctgccgccgtccaagtgacccccatcggcgaggacttggctctggacgccagcagcgagcacgacgtctccgacgaagagctgctcgaggtgctgttgtgtctgttagacgacgagcctatggccagcaaggacgacgaccagcaggacacacaaggaggacgaccagcaggacagaccactgcgccgactcctgtcggactgtaggtacggtcgtactagttatcaggagctgacctgtcgacccgagaaatattttattcctgcacaaatcacaaaaaagtttttcttttgatttttggtccagtttgtgacgtaagtatggtgcacttcaaatctagtccagcacggcgaagctggctgccgactcggcagtgccgagatacacagcaggaaggtcgacgctggctcgaccaggaaggtcgacgctcgctcgaccttcctggtcgaacaccaaaacgttacgaacgtcaaccatggtggacagtacactaaggtgtgcgcgcagccagggttgacgttcgtaacgttttggtgttcgatcttgaaagcagaagctgttgcaggcgcgcagatctgctccgcaaaatcgcacgaaaacctctgaatgctatggcactctgcttagtgctggttcaggcgttcggcgttgggctaatggagtgatttttcgcgaggcagctccacgtgggtttgctgagcgcagctcgacagtactgcacctgatatcgaccgcacgaagggttttcgctcaccaggacggaagcgttcaaagactacacagcgatcaacttaacagggcatgggtctccatgtcagggacggagctcgcggaagtcgcgcggtcgaacgaaagcgccatcaatagcgcgcaggcggcgatatgttctacgagtaggaccgttgtcgaatgcctactgctacaaaggactctgggaaggcaggcatagctgctgtccgcaagcatggtcatatctcgacaattggcgtcacacgaggaaccatttcgcgccgattgcttagctgcgccaagcacttctcatcagctaaactcagccagcacctagcacctgggccagcatagtacatgctccaagtgtacggtattggcgcgttggcaacgccgttgcggctgtcgttcttgggtcaggccggcggtggaggcgatgctcgacgccacagctgacaaatgtaatcgtgcttccagctgcacaccttgcagcagtgctcgactcggcgggcagattgtagactgatgtgtgtttgatgtgtgcgactgccagaacttcgcaggggctccgttttacactgagcgtccaccccgcccggctcactgcttcaacgcgatccagcgtggcaagatagctcgccaggagctgctccgccgaggcctggagcgactgagacggaggcgagggatcatttgaatctcgtgcgccgggcgcgaggctgcagcgggtggatactcagcaaataatcgccgtcgtctacagccaagcgcgctgtggttgcagtggtaagctgcgcaaactgcgctgattagtcagcgtctgggacaatgcgaatcgcccagctcagtgttgaagtggcaggacttacgtacacagtctattttcggtgatatcttggagtttgtataggccctccgttggtcctcttctatatcacattcacccctcctcgacccccatcaaaaaagactgtgtacgtaagcactcccgtgttgaagcggcaaaagctgaagacggtcgacgagtggagccacatgcagcgctcgtttcgccccaatgaattgcccacaacgcgatcgagcggcggcagcagcagtgccgtcctgaggcgggccgctgcgattgcggtgcggcgaatcaccgccgggagtgcttacgtacacagtcttttttgatgggggtcgagggggggtgaatgtgatatagaagaggaccaacggaggctagcggttgcggggagcgtcgccgcagcaaacccgcgcggggtgccggcgtagcagggccgcgcggtatttgcggaggcgggcccagcgaagagcattccagcgagccgagcactgttctcgccaggtgagagaatctttttatcgcaggagcgcagcgactgcctttgcggagcgcagcggagcaaagccatttcccgcggatgacatccgtcctgcgggaaggtcgtcacattgtggggtgatgggctacctatacaaactccaagatatcaccgaacatagactgtgtacgtaagtcctgccaatcaccgccggcgatccagctcaccatcctggcgccgcgcattgagtcaaagcttgaccagcaaggcaagtccgccgtgacgaaccgcctcgcccggctcagaggtccagcatggtcttcggttaccacgcctcgccggtatggaggccggcgtgattgagcttctgcctgctgtttgccaagcagcgcagcgagcgatttgacccagctgccctgcctgaggcatcatgcctgcgacgggaaggcgccgtggctaagctgcaccgaagcgggctttgtactgaattgccggctttcagtcccattcaatggagaccgccgtgtttggctatcgacgtacagtgtacatgtgtagtgcacgccgcgtgctgtgtcttgggcggagggaggatgtcgcaccccgccctgtgaccaagtgtcaacggctgaactctgcactcgcggacgccgattccatgtcggcggcgccccgctcagccaagagctcgtttcgctggctattctagccggatatttatacatgtagctgggttacgtgtcgtgtcacaacgtcagcgtggcagcggcgcttgccatcgcctccagctccagctacatgtacatgtagcaagccacgagaccagcgctcaaggccggcgcgcactctcacttccgcgccgacgggggcgtgttcatcgtcgctgtggtcgcgacgacctaggctgtcggccggcacctggccggacctgccgctggccgttttctgagactggcgcggcgcgtgcgccccatctcagcgagccgtcaacggcaagcggcagtcccccatttcggaattggacgcgccgcgtcaacaacgcactcactcagctacacaggcccccgcgacgacaatgcccacagccagcgtggacccggcgatggcccggcaggtggtgttccggtgctcggtgccgtactgcgagcgctccttcggcgacagcttctcgctggccgagcacctcaagaagcacgcgggcgagaagcgccacatttgcccggtcaagacctgcggccgccgcttcagcacgcccggcaacctgtcgcgccacaagcgcctgcacggccccatccggccgctcgagtgccccgtggccggctgtatctgcacgttccgcagcgagaacaagctctccaagcacatgaagttccacctcggcagccccgtgcacgtgtgcccgtcgcccggctgcggtaagaccttcagtacggccggcaacctcaaccgacacatcaagggccaccacccggagctcgacacgcgcaacaccaagctcatggccgccaacatgaacccgctgccgggcctcgacgcgtcctacgacagccccacgtgcgccgacgagctgctgcaggccacagagcacatctccatgatgaccgagctccggacgccgctgtcgcccgcctccagtgtgtccacggtggacgtggccccgtgcagccccgcgcccagctcgtcctgcgcctccccgggcgcgtcgcccataccgagcatgacgccgctggacattgcgatggacccggagcagctcgacgaactcgtgtccatcctgaacgagacagtgacggtggaggactcgcagccgagcgctgcacccagcaacagttttctgaacgagcagcagtcgatgacagcgcagcccagcgtgctcgacgacatgatccggttccacatcgacaacctgcagatgtgagctctctacagtagctgcaatcgccactaacttaacttatgattgaacgaaggtgtttttgttgttgttatcgaatgcatcgccgttgaagctactgcagttctccattagcctacttagtctatttgcttcgaagctacactaacacttgcgcttccaggccgcgaagctaaaaccgctggaagcgcatagacgccctgctggtccccatgccgccaagccgagggcaacacaaacgtctcaatttacccacgtgcgcaagcctcctcctcctggccactccgctgattacggtcgagttgcaggtgccccagcgcgtccgctaatccgctccgcggcgcactaacaggtttggtgccgattagcggccttcaaccttgggcacagggaacagtacagtgcaatacacgaacaagacccaccgcgtgcaatgcaaatgcgccttgtcccaggaagagtcgtgaccaacgccggcaacagcaatggggcgccctggctcacgggtcaatctggtacaatgtaccaaaccgtacttattccaaaatcatgtggtgcacatcatatatgatgtcgcactagtgttacgtgaagtgctccctctatacacggctcttcgcgcaacctttcccattttggatctcctccccgactttaggatagatatccttctctagcggaacccccccttcaatccagcagagcagagcagatcgagctaatgagcgcgcccgtggtgaacctcgacttcctgcgcgccggcagccgcggcgcgtccgtgaactacggcggcgcgatgcccaacatgcacatggcgaccatggacgacctgcgcgtagacgcgggcgcgggcgacgcgctggccgcgggcttcatgctgccccccgtggcggacccggccgcctactcgcgcgagcacttcaaggtcaagtacacggaggacaacgagcagacgctcaactttgccaagggcaccaccacgctggccttcatctacaacggcggcatcatcgtggccgtggactcgcgctcgaccatgggctcgttcatcgggtcccagcaggtcaagaaggtgaaccccatcaacgactacatcctggccacgctggccggcggcgccgccgactgccagttctggcagcgcaacctggccgtgcagtgccgcatgtacgagctgcgcaaccgccaccgcatctcggtgcgcgcggcgtccaagctcatcgccaacacgtgcaactactacaagcgctacggcatgtcgctgggcatgatgatgatgggctacgacaacggcaagcccgtgctctactacgtggacgacgagggctcgcgcatcccggccagtaaggacgtgcccaagttcagcgtcggctcgggctcgacgtacgcctacggcgtgctggacaccaactggcgctgggacctgacggacgacgaggccgtcgagctcggcaagcgcgccatctaccacgccacgcaccgcgacgcctacagtggcggcatctgcaacgtctacatcttcaagcccgagggcttcaagcacgtcgtgcaccaggacgtcaaggagatgcacgactacacgcgcgacaactaagtacagcacagagactgactgctgctctccaggaatttatctgcaagcagctgaaggaggaggagcagggcctgaaaggagcggctagtttgatgcggtaatacacggcagcaatttgtgcacaagctgagctgagtcactgtgtaaagcctccgatccaccactgtatttccttcccattagtcctccgcgttatcgtcacctcgtgaatgaacaagacgccgccatgctatcccctccctccctgcagcagatagatgcacgcacacaaaacgctgccactcatgattttctttctgtctgcatttgctcattcgtacagcctccgattaccatcgcaagtcaacaagcagcatccccacaaagccagcgccgtccgccacgggtgtgtactggtagccttcgcccgccaggaagcgctcgactgctggcagcagccgcgcgttgccgtcaggccccttcgagtggtgtcccgagcctgtgaccaagtaaatgctgtccacgctttcgtccgcgagcttgggcagcatctgtgtgaggaactccacggcttcagctacgtgcagtccgtgcagatccatcatccgatccatgtacagttggttgggcgggttgcgcgactcgaatatttctgacgccgccaggaagtggaagttcttcatcttgacgttgtactcgtgtccctgcttcgacagccccttagccagcgccttgttaccactgaagacacaacagaaaaggtgagatacaatctcggctagactcaggaggcacatacaacgtacttgcgatatgcttgagtagcgcccatgaagcacttattccgggcgcaagccatctcgtacgcctgctctcgcagctccaggtactgtgtagccacgctttggcccgtagatacccacttggtgccaataccttcgctgctccctgccttgtgatacagcgggcggtgcacaggggccggcggcggcattcgtcgcgtcgagtccaagccatagctgccattgcccagagggcgggtggtcgccccaggcgttggctgcagtgccacggctcgagcaaagttcatggtcaaattcgccacagcatcctccgtcgacgggtacgtcgtggtagctgctgccaatgagggaccatcgcttccttgaggtagcggcggcgaggctggcgctgttgctcctgacgtcgcgctctgaagagacgggaacatgtcctcggcttggatgtccagcggcgcgccgttctgctccatctcgtcttcgctgtcgtagtcgcgctggcccagcgcattgtcgtccatcgaatagtattcacagaagtcgtgcgcgaagacgcagtgctcggcttgcaggcacgtgcctcgcagccagaaccggcacgtgatcttatccgtgtcgtgcaggaactacagccacaggcaggcaaggcagcaacacgagaggagccggaagctttgtgagcatccaaaccactccgcctcttacacagcccaaggctcatcttgcattgcaaatgacagacgcaccatgcagtccgcgcgacgacactcgccctgcaagtagtggcggcacacctggccggggccgatggactcgcgctcgatcgtcgccttgagcaccgcgtgcgccttgtccacgtccagtcccacaagccgcaagaggtcgcacagtcggctcgggtcgatgtccgggaacttgagctgcaagtggctcacgagctgcgcagcaccaccagaacacaacagcaacagcaacaacaacaaactttagacacctgcacctctccccgctctccaccaagctcagcagctaatactactgcagagccaaaactaagcacagaacgagaacgcggcgtctccatcccgacgaaagtagcgacgtgttgggtcagccaggtcctgggtccaagtccactctacctcgtaggccacggaccagaagaagctgtcttcgttctgcagcgccgctctgtcctcatcgtcgtcctcctcctccccgtcctccacagcctcctcctcctcgtacacctcgctgctgtgcagatgcgacagcggcaacggcaatggcggggacggcgacgcggccgcctgcacctggccaaagccgccaccgaacgggccctcggggctgcccgtcgggtggaactcggccaccacgggcgacaggaacttgctgcggggcacgaacgtgggcgccgaggccttgagctcctcgtcctgcgccagcatcttgttgatgtcgtcctcgatgcggttgctctgcgccgccatggccatggccgcgtccgtcagctgcgccgggttgtccgccagcttggccagctcgtccacgaactcctgcgcgcgctcctcgtcctcgggcgccagccagcccatgagcacctggtggatgttgaacttggcgtcctccaggttgtcgtcgtcgccgccgtgggacggcagcatgcccacgatgtagggcgcgaacacgccgtccacgcccagcgcctccaggcgcgcggtcgcccacgcctccagcagctgcatggatcaccaggcctcactccgcttcggtacagtacaataggcgatggcgttatggctagaggagctgctcgacatggagaaaaaaacaagacctatgggggcgcatgcgtatgacaaaggagaggtcagaactgtatcgaaaaatgcggtaagcccaacaccttcacttcacttcacttcaactcgcacactaaagaaaaggcgatctgaagctgaagctgggcgtgatgcagtgccgcatattgcatacggcgagcaatacggcgaggtaaggtaagtgagagtaggaaggcgaagcgacgttggtcgaaatgcttgggtcggggtggatggggatccccaacgatggatatcgaggcaggttgatgtagaactctacatgtagcaccacgaggcacctggcaccactgtgatattgatttttatcaaaggtatgaatggcttgcccaggtgcgcattaattaatagacacgtgaagcaacggcagcgttaaatgtaccagtgaagctgctgccggtaggttaacaacgtaaaatggatggatggatagcctacgtttgacggagagacgaccacttcggttgaacggtgtgcatgtgcacgtattaatacatgtacattagatctgggccccaagacaacaacagcaacaaaacatttcgagttgttttgggtctagaattttaaaaactatttttatagtttttgtttggcatgagttaatatacgcgcggctggcgcaatggatagcgtatcagacttcgaatctgggggttgcgggttcgagtcccgcgtcgcgtacacttttaaccaccaccaacttgacaccaatggagcacgtttgctcgaccattccccatgaacgaagaagaccaacggagcaccggatctactgatggtggcagtcaaatttgctgttcgatttaatggattttatagtctcggatctccaactccctgatagtgaggaggttgttagtcggccaggccgagcacacgcagctgggccgcgaagtgcttgaggatgacggcgagacggctgccggccagcgcaatgcgtctctgggcgatctcaccggccatggccaggtacgaggccgacgggcacgggtagctgcccgagctcgtggcgttcaggtccaggttggagtagacgatggtgttggcgtagttgtacgtctcgaggatgacctcgcgcaggcccgagttggtgaccatggcctcgtacagctggtcgtacgaggcgttctcgtactgcgagaaggtgaagttgtccggcacgctcggcagcagcgcgatgagctccgtggcgttgctctgcagcgtcggcttgaagtcgctgacgtcgagcgaccacttgttgaggctgtagaggccgccggcggcgtcccacacggcgtgcaggttgctgaaggcgcacggcgtcacgaagatctcgctgttgccgccgccgtcgccctcggggaaggcctcgctgatgccggtcactgtgtgaagaggctggtgcagatcgccgaagatgtggatgaagttgcgcaggaagaggttggccgcccacttggacttggtggtcttgaaggacttcatggcgccctcgatgacggacacgccgtcgccgcccatggtgtcgtcgaagagcgacaggtcggcgtccttgtcctcccacttgtcgccgttgatgttgagcggcaggtcgatgtagtgccagtcgctcatgctcgtgatggagggcgaggccggcgtcgtgcacgtcgagctgggcgccgtgcacttaatgatgtccatccacacggcggacgtcgtgatctcgcccgtgttggggaagtcctcgtcccagcggctgaggatgctctcgatggtcgcgacgtcgctcgagttcatgagctgcgtggccacctcgccgacgagcatgtggccgttgtcccaccagccgtgagtcgagggcaggaagcccgccatcgccgtggccgcgacacttgcttcgaacaccttcatcgtttgatggtctgggagcgaatcgagaaatgacaaagtggtgggtggagtgcggcgttggtgctcgggggttgcgtagtcatgctacctcacctcatcactcgtgcacagagactggagtgtcgaggatcacgacggactcgcgccaccgacaccttgaaggcgggtttgcatgcatgaggtccatttgccataaaacggggactttgatcgtctgcaacgcgcagacagcgcccactgctgggtggcgttgaacccgaggacaagacagccggcaggcgagctgagtcagctgctgacacctagggcgtcatgtagtttgcattccgtgacttcatgcaaccagtgaccttaggtttcttcgctgcaggtgaaagcctgacagtattacggacgctccccatcggacaccgtcaactttttagtcgcgatcggattgaattaatcctggaattcgtctactacatggggcactttacagtacagtgccgtatcaattggatcagtacttcttcttcttggacaacaccggtttcgttcgaataggctgcagcttagggctggcctggagactggcaaagctcttggccgctcgcttctgcagctcgatccgggtcagtggccgatcgcagtcttcttcgtcgctcctgggggactcgggctcgtcctcggcgattgacgcgttcatgacgctggtgccggatagctgcttgtccagagtgaactcgacgcctgcagctgcgaatggcgacgctgccgctgccgactgcacggggctcgtgacctgtggggaactcgctccgccgtacgcgccgtttgttgcaggcccgcctaagaactccgggagaagagcgcggacggcgttgacggaacgagtcgggtcgctgggacggagattcgctcccagtgacgcgcgttgggcctcggccgggttcttgtactggagtcggcgtgagaactgctcgatgagctcattgctccgctgttcaatgatctactcggcaacaatgttacgactaaggtatcatgattgaagtggaacgatctgatgctacgtaccgccaagaattggagaatatttccttcggtgataccgtgcgcagccagaagatcgttcatggagttgatacgagcctagtcgaatagcaaatgaatgaaatgaataagggtaaggtaaccaaccacaatcgtgtggttgagcgcgtttgctagcttaccaccatcgcgagttggtcttccgactgctttcgagtgcgcttggaatcgccaccactggaagacgcggaggcgcccacgacaggctaggcagaggaggtcacaacaggtgaggtgaggctactgcggacactccatttgtagcccgagtttcgtaccggcatgacgtcgttgcagccgagcgcgttgtacagtcggtcgacgacgcgtgccagcggctgaaattctcgagcggctgcagctcggagtcgctcgatctccgcgttctccttgaaaatcctacaaaagtcaccacaattgagtgcatttgaacctcatcccagtcaagctgatggtattgacgcacttttggcgagtttctacgagggcgtcgaccatccgctttcgtgcattagcactgccgtcgagcatgtcgctcttcaatctgaaacacaccacaaaacaacagcaatagttagagacgttctgaatgagcggtaccgttcctaaacctcgacgagctcacttctgaatctccctttcaagcgccaacttctcgtcttcgagctgctccacttcgttgttggtactttggacgtatcggaagagggcgaagttctcctcctccttcctcgaatacacctcaaccagttcgtggtagtcgtccactcccatctcctgctgcagcgccgcgaacgtcgtctcgaactcttgcagcttttcattgatagacgcgacgttctgcttatcttccagcatctacaatccctcacaacaatgagtaacaacaactaaaacgacggcaacatcctcccagccttaccgtcgtgtctagcttctgtagcgtcttcttgagctgctgctcgtcctccagcttcaagttgccacgaacgaaatcttcggccaagtcgagcggatcttgctccagaatctgcttcctatacgtctcggcgctctccttctcgcgcttgatgatcgacgcgaggctctggtacacttgatcaaacgcctcctgctcatccatgttctggcccgacaacgagttggcttgggacaggatgcggtcgcgctcggccacgatctgggtcgactggcggaaggtctcctgcatctgcttctggatctcgcgcagtcgccgctggttcttctcgaacacggtttggctcagcacccggttggctcgcagctcgtccactcggtggcgcagctcggcgttgtacgcgaccattttgctctctcgggtccggcaggccgacagtcggttctcgagcttcatgagctcgcgctgctcgtcggccatgcgagcgcgcacggcgttggcgccgccaccgcgttggtcgcactcgcctcgcttcagtcgcagctccttgagctcctcgtggacctttttccagtgatcatccagttgtcggagtcggtgcttctgctccaccagcagtcgggcgtacttgtctccttgcacctgcaggatgaagagctgctcgctctgcgcgcggacattcgacttggacatgctgcagagagagagaatttctctaaacgagtttaaaggaggccaacaaggccaaccccgagcaaacgtgaaacgcgcccaagtattttcgtcgctagcaacttttgtatcgttcaccctcaaattcatgcaatacgggcgcctcctttccgtaggattcgcccttcatcatgtcgtggagagcacctcgccagtcggtgctgtcaactagtagtggagtccatgaaaggcctcaaaaaccgatgaagctgcccgtggttaaacgcggagggggtctccgcgtgggtcgagtcgtatctgtaagcacattaagcagaatatttgagacttctgtaagcttagatgggtactcatcgacgggatgtctctttgtggtgcaggatgttcggggtagttcgagctgggatagtcagtcatccagtccgttcgtgcaggaggaggagaggcgagtgcaggaggaactcatcgaaatgctcacggtcaagctcgccaacaaggaaaaagaggtggagacgctgcggtgcaagcaaaacgcggttgatacagaatttgcagggcaggatcgccaactacgacagcaacaggaagaacacgcgcgggttgttagtgagctgacgacgacgaaccaggagctgcagcgacaagtgcagcacctgcagattcagagcgaacgggtacgttttgcttcaactctcacctcatcgatagtgtttacgaatgacagtgcgattgtaatatgcagctacaagctgatagtgagactcagcgcacagctgcacttgagcaaaggagactacgcgagaaggagcaagcccaagcacgattagagagcaaaactcaccaccaaattgtagacgagcttcgacgagagcgggagaaaagcgtcaacgatcgatacgctctggaaaacaagctgcagcgactcctccaagaccatcaaagcgaagccaacgtggtgtgtactgccaatgcgctattgtcttcacggatacacaaactcatggattgttggcggaatacgcaggttgctcagttcgaatcgaggtgcagccaacttgaaaacgaaattcaagaatctcagcaaatttgtcaacagcttcgcgaggtgagtgatgttaatcgtctacgagttttacgtcactttaacacttgcttctgtcggtgtaggctcttgttagtgagagacagaagcgtgcagaagctgaaaggttatcaaagaagttcgaagaggaaaaggctgctcttgaggacaagcagcgagcgttgatgaaggtacgcggactaaatgattccagcagtgcaaacttttgtcagttttgcctaacgggatgttgttgtttgatgaagacgctgaaaggtgcgagttcgagagcagccgacgtggagaagaagaagaacgagttgtcccgagtcgaggaccagctgaacgagcagcttgtagccctcaaaaaggaaaacctcgagctgaaagcccgcagggggcagatgggctctcaaaccaagcacctgcaggctcgagtggcagctctcgagaatgccaacgccgtccaggagcagaaactcgaagacgccgcggtggaactcgaaactgcgcgcaaatactgccgcgactgccaattccgcaccaagcagctccaggaggagatcatcttcctcaagaaccgtaaaaccgcagcaactgcagcaacaacagcagcaacaacaaattctccaatcccttcgccaagtgacaataattcagcatcagccaacagtaattgtcagcccattgagccaaaactctctccagagaccgctgaagcagacgacgtgccgtgctggatgaaagaaggttaacgttaacacctcttccccccttgaatataagactcaccaagacaagaaaaaaattgagaattgagttttgttttgcaatttatgcatcggcggcaacagcagtagcagcagcgggaggagcgttggcaacagcccccaggacgtctccgtagccagcgggggctggcttcttgcccagtgcgcactggatgagctccttcagctgcgggtcggcggcgtttttcttcttgcggcggccccagtccttgccgccgacgcgctccgcccggccctggtcgttcagcacgccctggctcagcttcttgttctcgaagaagtccttgacgcagaagatggtcacggtctcgccgtagtctacgagcaacataacaattattggttagatgaatgaaataaaaaaacacaataatattgttggcaaccgacagtggaaattggtctcgcggaactcgttcttgatcacgggcttcttgggcttgacaggctccgcccgctcgggcttttccacctctgcaaaatgcaaaaaatgtcaccaagaggcagtggttaaggtaactctaaccgtgagcttgatgtttgtatgtacactaacctttcggatgggtgctgcactccccctcgcgtgccaggcaacactttttgcaggcaacattcttgcaaccggcggccacctgcttcttgctgctgcagaactggcacgtgcgcccggacgtctcggctctggcacgcttggcaggcggcggcaccacctccacctcctcctcctgtgtcacgggctcctgcggcgcctcctgtggcgtcgtgtccatgggctcgagctcctcaggcgtgctcgacataatttacctaactggtcggcggttagctctatcataaaatttaagtgaagtttgcgtaatcggttcaccctctaaagtacgagatagttgtgccttctttctggaagcgcattacgtgaacgtggccaacttccagagagggagagaacctcggcttggcgccggttaacactaccgtaacgcgacaatggtgaaccttcacgtcaagacgacggcggggaagaagctcgaggtggatgtgccgctggaaagcaccgtgctgcagtgcaaggaggcgctggtggcgtccacggaggtgcccgcggcgctgcagcggctcatctacaagggcaaggtgctcaaggacgacctcacgctcgagagctacggtacggcaacacccccgccaatttaacaccacttaaccgccggtttggtttaggctagtgctaactgcaaaagttgctgcaactctcaggcatccaggcggaagataccatttacttcgtcaaaggctcggcgcgtgcaacgacaagaccccctgcggcaacaacccccgccaccacggcaactcccacagcagcggcagcaccagcaacaacggcaacaccccctccagcggtggcaactcctagccctggtgctaacccgttcaacttccccttgttcccgggactcggaggtgctaacgccggcaacatgttcggcaacttaggcggcggtgccggcggcaacggcatgccgagcatgcagcagatgcagcagcaaatgatggagaacccggacatggtgcggcagatgatggactcgccgctcatgcagaacctgatgagcaacccggacctcatgcgcaacttaatgcagagcaacccggccatgcagcaactcatggagcagaacccgcaactcaaccacatcatgaacgacccggagttgctgcgccagagcatggaggccatgcgcaaccccgcggccatgcgcgagatgatgcgcaaccaggacacggcgctgcgcaacatcgagagccacccggagggcttcaacgcgctgcgccgcatgtaccacgacgtgcaggaaccgctcatggacgcggcggccagcggcgcccccgcggccagaggtcccgccttcaccatgcccggagttgccggtgggggcaacagcaacactaccggcaacaatgcaacttcaactcaatctgcggcaacttcaactccggccacggcaacttcaactggtggtgttaacccgtggacaactggaggtgcaaatgcaaatgcaagcgcaactggcgcgggcgccaacccgtgggggggaatgggaatgggaggaatgggaggtctcggaggcatgggggcaggaatgggcggtgccaaccccgagatgatggcgcagatgatgcagagtccgctgttccaggccgcgctggaccaggtgacgagcaacccggagcagttcctggcgcagatggaggccatgaacccgcagatggccgccatgatgaacgccaacccacagatgcgccagatgatggccaacccagagttcctgcgccaggccatgaacccgcagaacctgcaggccatgatgcagatgcagaacgccatgaaccagctacgcggctccggactcgtcccagggtacgctttccaatagttggggtgaattgttgctgttagtggtgttaacaccattttttccttcttctatgtcaacagacttgaaggtctgaacctgggcgatgctggagctactgcgggtgctggagctgcgggggcagccaatcctgctgcagccaacccgtttgcgatgtttggcggcttccctggcgcgggtttcggtggagcagcgatgggcgcggcaagctccactcctgctgcacctgctggcaaccccgaggagatctacgcgtcgcagctgacgcagctcaacgacatgggcttctccaatcgcgagcagaacatccgcgcgttgcaggccacgatgggcaacgtgcacgctgccgtggagcgtttgctcagcggcaccatataggagagtgcggggcaggtcgtcagtctgatctgcactaatacaagctactagctaagtacagaataattgttttcgatcgaggcgtgtgtgcgcatgtacgagttgattgggtggccccatctgcagcccacgcttactactagggatcccgcccggggatactactgcaagtcaaaagtttaatcaactcgtaacatcagcatcgctgcaccggtcggaaaagcgccaagcttgttgcatctacctccattccgtcatgttgaagaacctggtgcagaacacctttgaatagctgcttcagccgcacaagcacgtccgccggcatcgccatatcggcccagtccgtgctgaaggtgtcacaggctctgtagatctccaactgtcacgccatgtggtcggcaacatcccgacgtccatgcaccgcaacttttagcacggcctctcacacttcgtagcactggagtgctcgcccgtccgcggccacgaacaactctgcctcctccatctcgtcttggatgttgtacaaataacgccaaaataatggagaacctgcaggttagcaagaaggatgatcgaattactatgcgccacccaccctccttacgtctcaaccgacttccatcctgcgtacttgccgcacgggccagcgcctcgcaccttcgccgtcgaatataaaggcgggggacgccatgtttcagaaagcggtgcaaacctcactatctgccaattgtctggatacgtagcaagttgaagctcgtttttttgtaccgaaaatgactaaaactgtatgtattttgcttgtcaaggggcaacttcttcaatcgatggcaggacgcaaccggcaaacatcaaacgcactcctatcggtgtaagtacagttgattttgttaaagtctaatacttgctactatgtcgtcgctgctcgcgggccaaaacgcaattcccttcttgcttgccaacgggtccgcagcacttgacctgcctaagtccttctcgctccttccctctctatctcttggtgtggttgatgtagcgcagcgagagcatcgagagcaggcggaagatgatgatcgtcacgaacacgtagccgaagttggcccagcggtcgtcgtagttgtacttgaacgtcgactcggatgtactccttgaccgtcatgtgcgagtacgtgaccggcaggaagcgcgacatcgaggcgcgccgactggaggaggaagagctgaggctgatggccgcggcccagcccgtgttgtacatggcgtgtctggacttcctcatgctggcattgttggcggctctgcagtcttggcatctggaatacaaggagcggtccttcttctcggcgcacgggttcttcttgcatgctatacacaagttcggtgctcgcgcgtcagccgcagccttggctctcttgaggcgacacgcctggcaataggcgtgccgtccagacgcggcttcggcttgctgcacgacccgcactttccctggtccttcttgacgtcgcgcacgactttctccttcttcttgcaccactggcacattacaccgcctgcctccggcgtctctgtgtggcacctcacgcattgaccagcgctcttgtccgtcttgtgtcgcttcttggcatactcgttgttgttggcgttcttcttcgcccgcttcatcgtggcgcgggccgtctgctcctcctccgtcgtcaggccttcgctggcacggggtgccgcgacctgctccttcagcttgagcttggccttctcccttgcgaaccactcagcctccactaggagagcgttcacgggcagaatgccgacgtcaaattcatgtgcgatcgcgtcaactgtaacagtacagatagcatattagcaaaacgaaaaatcaagtgcagtgagtgctcactttcactgggctcaaagtggtgtgtcaggttctcgatggagagctccaggcccttgaacgatgggttcgcggaacccgtcgttgccatgatgttctcgactacgatcgtctgtgcaaacaatagttagtaacagcttgtagatagtttagatagacgattacgttttcatggttggtggtgctctacttcttggggacatagacctccacgcccgccgccacaagctcctcgacttggggtagttcgaacaatgacagcgccatcttccagtcgaggagtagctggacctgcatcgtcttggccttctcgatcaggatcgccacgacggccgggtctgtcaatgaaaaaagagtgacgcgcgcagctttccctcgtgagcgatccggaaaggaaacgtatagatgtcccggaagtcggggttaccccgcgagaagtagactttggagaacggtagacgtttgatgtccttgttgatgccttggaaggtcgcgcgtgggatcttcaatgccctcgccagcgcccagtcggacaggccgggcttcgtagcaagcaggtcccagaccttgcgcttgacacggacaggttcgtgcttcgggtcgcgcttgcgtttgtaccatggatctcccttccacggctcgcacttcttgaacttcgtcacgaccttccggacggtagcctcgccgagcggaggcgtgcatgcctggccggcggccttgtagtcaatatgcttcttgtcacggatggagggcgcaagcttgaagatgggcttcttccgcactggtctggttaatctttttgttggagggcggcttggagcacgctaggggacccccttgcggccttcttcttctggccgggcttccccatggcgagttggattgtgaggagacggcttcgaaagtgttggctgcatggctcacttcgatccaagaagttttctaatgttcggggcagctgcccctcttgggttgggtctgggtgcgcgcgctgtccgaggcgaacgacctggccatccgccgcgccacgggctactgcgagcagatggacgtgcactcggaggcgtcgacgaggcgcgaggcgctgacgttcagcgcgttcctgcgccaggacagcagcatcccggacagcaagaagtacgacactgtcttgacctgctggacatgcacgacatcgcggaccagatcatccgcggcagctcgcaggagcagatgaagcgcctgacgatcggcgtggagctggccgcgcagccgagcatcctgttcctggacgagcccacgagcggcctggacgcgcactcggccaagctcatcacggacggcgtgcgcaaggtggcggactcgggccgcaccatcgtgtgcacgatccaccagccctcgtcggacgtgttcttcctgttcgaccacctgatcctgctcaagcgcggcggccagtcggtgttcgtgggcgagctgggcgagcggtgccagaagctggtcaagtacctggaggcggcgcccggcgtcaagccgtgcccgcccaagcagaacccggcgacgtggatgctggaggtgatcggcgccggcgtgagcaacgaccgcgcgcgcgatctggacttcgttgacgttcacgaagaagcgcgcgtccaagggctcgacgcagatgtacttcctcatgaagcgcttcttcaacctgtactggcgcacgccggcgttcaacctcacgcgcttcggcatcgtgttcggcgtggccatcatctgtggcctgtcgttcctgagcgtggactacacggcgtacagcggcctggtgggcggcgtgggtctggtcttcatgtcgacgctgttcatggccatggccggcttcatgggcacgctgcccgtgtactcgatcgaccgctcggctttctatcgggggcgcgctgcgcagacgtataattcgctgtggtacttcgtggccacgacggtggtggagatcccgtacgtgttcggtcagtcgctgctgttcatcgtcatcttctacccgatggtgggcttccagggcttcgcgacggcggtgctctactgggtgcacgtgtcgctcttcgtgctgggccaaatgtacttcgcgcagctgctgatccacgcgttcccgagcatcgaggtggcggccgtcatgggcgcgctcatcaactcgatcttcctgctgttcgcgggcttcaacccgccggcggcgtccatcccggagggctacaagtggctctacacgatcgtgccgcagcggttctccatctcgatcctgtcggcgctcgtgttctgcgactgccccgagagcccgacgtggaacgcgtcgctgggccagtacgagaacgtgggctcgcacctcggctgccagcccgtgtcgggcctgccggtcacgtactcgcacatgacggtcaaggagtacatccgagtcgacgttcaagtacaactacgacgaccgctgggccaacttcggctacgtgttcgtgacgatcatcatcttccgcctgctctcgatgctctcgctgcgctacatcaaccacaccaagagatagagagggaaggagcgagaaggacttaggcaggtcaagtgctgcggacccgttggcaagcaagaagggaattgcgttttggcccgcgagcagcgacgacatagtagcaagtattagactttaacaaaatcaactgtacttacaccgataggagtgcgtttgatgtttgccggttgcgtcctgccatcgattgaagaagttgccccttgacaagcaaaatacatacagttttagtcattttcggtacaaaaaaacgagcttcaacttgctacgtatccagacaattggcagatagtgaggtttgcaccgctttctgaaacatggcgtcccccgcctttatattcgacggcgaaggtgcgaggcgctggcccgtgcggcaagtacgcaggatggaagtcggttgagacgtaaggagggtgggtggcgcatagtaattcgatcatccttcttgctaacctgcaggttctccattattttggcgttatttgtacaacatccaagacgagatggaggaggcagagttgttcgtggccgcggacgggcgagcactccagtgctacgaagtgtgagaggccgtgctaaaagttgcggtgcatggacgtccatggcgtgacagttggaggtctacagagcctgtgacaccttcagcacggactgggccgatatggcgatgccggcggacgtgcttgtgcggctgaagcagctattcaaaggtgttctgcaccaggttcttcaacatgacggaatggaggtagatgcaacaagcttggcgcttttccgaccggtgcagcgatgctgatgttacgagttgattaaacttttgacttgcagtagtatccccgggcgggatccctagtagtaagcgtgggctgcagatggggccacccaatcaactcgtacatgcgcacacacgcctcgatcgaaaacaattattctgtacttagctagtagcttgcattagtgcagatcagactgacgacctgccccgcactctcctatatggtgccgctgagcaaaggctccacggcagcgtgtatgttgcccatcgtggcctgcaacgcgcggatgttctgtgcgactatagacccataccgctggactgcgtctgcgcgggacgaagatctcttcttggtgcccatggtgccctgccgaaccgtacatagccctcgagtgcaaagttgcccttgcagttgagctgttctgcaacgctacgtggacaccaccaccactgcagcacggtgctgtccatcttgacaccaaatcgtgagctcgccgctcgttttgccagcacccgtagcaagttgaagtgggttttctgtccttcctattgcacaaatcaccaaacacatgtacaaatacacaatcactcctactgcccccgggggtacaattccatactctaccccgtcctctaccactccaaaccgccatgcaggacggcagcagcagcgcgcgtgagctgctgcgcgccagcgccacggacgccgacgccgtgcgccagtacctgcagtccatcgacgcggacgaggtgcgtctcgtgtgtccccctcaccctctccaaccctctctaaccttctcaaaccgtctctaaaccgcagctcaacggcctgctggacggcatcgccccgcgcgacgccaagcgcaaggcccagaagggcgcgttcgtggtgcaggacgactggctgccgctcgtgcacctgctggcgcagtgcgaggccacgcggctgcgcgccgcctcgcgcatcatccaagtgctgcggcgcggcagccccagcgagctggagagcatgcagctgctcacggaggtcacgctcggctacgcgcgcgcgctggacgagctgcaggagcagcagagaggcagcggcaacagcaggagggataggaggcggcggctgctgctggacgagatccgcgtggtgctggacatcgtcttctccttcctgacggaggtcgtggaggccgccaagcccaccaaggtgctgccgcagctgctgggcctcgtgccatactttctggggctcatgggcgaggtaggggacgaggaagcgggcgcaggcgtccaggaggtaaagtggtgagagctttattgatttattacggagaagaactgatgagatgtgttgttgttgcagaatttggccaagttgctggagctgccgtggagttgccagacggtgccgagtttgctggatgtgctggtggatgatgcggcgttgatgtcgagagagagctggcagcagcttcaggtgcggagtttttttattgacgatttattggttgtgttgctgatggctggcttttggttgtgttttttttgtgttggtaggagaatgtggagcgcatggtgacgacgtcgcccgagatggcgagcgagacaatgaacccggtgattcgcgagtgcgtgttggtggcgaatgtgacgggcgaccacaagtggatcggcatcgcgcgctatttgctccggcaattacccgtgcacctgcgacaggaggcggagttcaacctgcagatggtatgagtctttttcgtggtgaaatgatgcgcacttaggttgtgactaattactcgcttttctggccttacagagcttccagcagtcaccacgaattgttgcacttgtgtgcgaatccattcgttcgagcgaattgtcggagtcggacgacgtcaacatgacggacgccagcggtttgtttgatggcccagcttatagcggattggatctcgcactggactggcgtgacctcttcctgctgctgcactctctccaggcgtccaagcccatcctgcaccatcgaacatcgtcttctcgcgtcgcaacggaagcctccgtgtttacagatattgaacagctcgcgtggcggattgtgcagagtgatatcagggttttcaccagtacctcggcgtcaaagagcgcaggatcccgaacggtggcgaaaaccatagagaaacacatacttgaccaagtggagcttcttatcaatttcggtggcaagcaaattcacgctcgcgagtggaaagcgctgcttttgatggacatttccttcttctggatagagcagggcgatacgggcgagcactcgccatccaagtctgcaacggcgttgctgttattacaggcgattttcgagacggtatgtctgttgttcgtcctcttttcccgtatgtgcctaattcgttcctgcaattcaaacattcaggcctcagaaacacgctcggaagtgctcagttgcttgtttgaacgatgtcaaaagccctcacagagtaaggtaaggtggccgctgtaggactgtcgtattcaaacaaatggatgaacctaaccggtgcgttgatgtagatcgcggcggaaacgctttcgcaactatttatttcgcaatcaggaaagctgttccctcacttaaatgctattcaagactggctcaggtacctacgaacagccatacacgacttttttgttgtgtcgaaatctgacaccttctctgatgccacatacagcatgcagttccaacggtcatttgacagtgcccgcgattactttctgattgcttcccgcttggcaacggtatataaaggtgcgttttcaaaactggattgcttgaaattaaactgaaaagctgacacgcggcctttgtgtcaaccagatttgtacaactttctgatgatatttttacgaaagctactgtcgaccggcaatcggtcgcaccagcaatttgctgttgatatgtggtgcacgtggctaaatcatcgtctgcctttcagtgagcagcaagaggtacttgctttacagtagttgtactggagtctgatcgatttttaacgccttgctgtcggcaggaggagattgtgtctgctctcaagaacagcatgacagcttgtcacgatatccaggcttggtcatttggtcgattggagcaaatattccagtgtagcgctgctccagtcgagggacccgccatctccttgcgcaaaagctcatgggaagagcttcatcggttcctatcccaagaggttggcaagttcattcagccgactacttcgattatcgctggatacggaactgatgacggttgcgacagtggagacgagtacgacgacgaggattcaggtctacagcggtttcgatttgactcgcttgattcgttctatcagcagaactctggtgtggatggagcagcgtcgataggcctgatattccagaaggttctttcgtgtttaattggattcgaaaaagctgcaacccgatcgaaggtatcgtccgagggggttccgatcgagggcctcggcgagaaagatggtgatatcaagcagtggctcgtcgacttggcgtccaactggaaatacttcttccactggatttgccaggactccaacgacttgttgaaccagtcagcgcaaggcagagcctgtgggaagagtgcgtggtggaagctcatagcccgcatctacattgggtgtgcagtttgcaatgttgcgattgaaatgcttatgcagcagcagtctgccgaagcttctgctgatcaagacaaggatgaacagctttccgtggcgttttctactgatgatagaggtatttcggtttggtcgttgatggaagtggagttcagcttgcaccggatgattcagaagcttgctgctcagtacacaaatgaaatggagacgagcctctcgaaggagcacgtcaaggccgtaacgttcgggcttcaccgagtgctgcagcctgaaaagctccaaattctgaccgccatcaagtctaccctactggagagcgctggggcgaacgtacctgcagttgatagacccagcgggatgtcatttgacgcggttcttttcacgttggactcgtgctgtagcactcttggagacgaaggtgtgtacggctcgtgtttatctcggggcagcaacgctggtggactaagcgaagcaggttccattcttgaagtgttgctgagtgttttcctcaatgttcgtgatcgcgtgttgacagccccggatctcgccaatgacaaccaggacgatcagtcaacttgcaggtcccagttttcagtgtttgccgattcaatttccgtgaaactccctgtatcagctcggcatctggtagcgccggcgaaaactgcgaaggcggtcgtgttgctggacgcaaaaagtggagaggagatgctggagcatgtctgcgcagcgattggacggacactggagatgatgatgaaaagcacgagtcttggttcagtgcatgatcacatcggaggcgtactgcgaaatatttcgtggcccgaagtcaaccagccgcccgaaggtaccagtagctgcaattttgtacggctatcgcactactttctgggtgacgtgaagaagtgcgttcagctggatgggtttacgaaactaggcgtggcttgcgcaacactcagcaaacggctttgtgacatcggcgccgagatggcggaccagaatgcggtctcctcacgttggtgtgctctctcctccctcgcctttgacatcttgtgcgacaacgtcgtgtacaacccgcgactgcttcgacttctgttgagcatttgcctcccgactcacctcgcgctccgtgtcgatacgtttgtgacgatggagagcaagattgaaggcatcattcaggcgtgtggacttgactcgggagcgactgctgtcgattctgcggacacaaacgagagccatcgtcagctgaaagcgcccgccaagaagaagcgagacaggaagggaacttcagtgcgccggaagcgtctccgacaaggatttgatgccaggtctccctacggcttgaaagtggattctgactcggactcgagcgccagccactcgtccgattccgatgattctgtcaggtcaaacgattccagtacagcgagctctagcgccaacaggctcagccatactgatttgccgacccgagatcgtattccgcacctccagtcgcaggctagccaaagtatcgcgatcctggccgtgttaactgtgctcgaacaatcccagtccacgctactcagtgccatcaccgccaagagcagcgcgcgcgagatctgcacggttctccatcaccaggagattctgagttacgtccgcattcacgagctggtcaaccaggcactttgcgacagtcgtgatttttcttgggggacccggaaagtgttgctgaaagtgcttcatatgatcgaacttggactgcgaatcggcaaagcaagtggcgcgttgcgaagagtgagtggtcttgatgctgatctcccgcccgacacggtgatctgcatctatgaatcctcagtgatgtccgccttgaagtctcgtacgtgggtcgacggaattaaggacgccagtcaagattcggggacgaaaaccaaggtacgttttgtagcatttggaggcgttgctgcactgaaattaagccgactaattgtttgttttcgatgtttaaacccaggtgtctgcaactttactcaagatggatatatttttcctgcaagttccggggaccgcgcagtcatggctgaaggaggtacgcaggaccctgtttgattcctattggtcgcagtttctaacgcagtatcattacttgcagagtgcactctcggatgcctcgaaggatcggttaagggcattggtagctttagtgaaagagaggatcgcgccgacagaccaagcaagcgctcgtcgaggaaaggcgaaggcaaggcagcgtctgcttggtgtcgtgccgatcgtgaggaagcgtcggaagcggctgcgcagccgccaccctatcatcgatgcgttcctcaacgaagaagatggtgcagacgcgttcgcggatctggaagattttattgaatagagaggggagacagtgtgtggctactgtagctgctctccccggtgggtacgccaattgctttgtatgctgacagttttgtgtgtttttgtttctgagccttacagttggtagttgcgacgcacaagttttgtggtttggggagtctgcttcgccaggtacttcgtgaaatcctgccacgagacccaaacacagcgtgttagctaccctggagctatctggccgacactagacgcgattctcccgtaccttttgccggattttgtacttcccggccaatgcttcagtgacgtgttcgctctcggatttcagctcgctgaagcgggagctacaatctctcgaagcagatactgacgaatgcactggcgtcttctcacgcgtgaaggccgtcatgtagaaacgtgtgcgtggagtcgatgtcgaaggaacttcccagtgctctttggtgtcggcagaactgggtacgcgggaggatctggacctgctcgatgattgatcgccatccgccaacgcttgcagatggtaaccttgctgcgataattcgaagctctccttgacaaggtgctgggcagttcaaggtacaagttaggcctagggacgacggagttctgagctgttatcaagcggaagttttacctctactcttgcatcgttggtgtcgagtgcttgcagtcgccgctgaattggacacggaagcgaattgtgagctcggcgaagcggagggtcagctgtcattgaagttccggagcacttacttgcatggcagcacacttgtcgaagcaggcggccgcttgctgtcgcagttctcgggggctcagtacatcacactgcagctgcttggactcgaagagctgaacgaaaggggaggaaccaaaggtgaccatggtgatcatttatgggactgacgcagaaaggatcctctctacctgaatgaatgatttccactgaatgttaccaggcgtcggcaatacgttttccagctgaagcacatcgctttgcttcccttcaagtcgagtcccgttgtacgagactgagtacccgcgtgtgcgaaggtatcgaaccgcctgctccaggctttccagagcgattccactgcagccaaacatacactttcagtcaggcgattgtggactttcaagaacgctctaggacgtacctgttcttggcttcttcgagcgattggaagtgtttcttgagcgctgtgacctcccagtcgcccaggcctggaatctcttcggctttgttgttgttgttgccggatctcctggaggtcgacgtggcgttgagcgcctgctgctgagtccgtttcagctcttcctgctctcgctcggccgcctcgtgagcgtgcttctgtcgcaacaaacagatcataacgtcagctggcgactactactactactacgttgtgcaatacaggataaggtccgtgcctgctgctctcgcttgatggccgccacctctctgaacagcatcttcacggtcccagacaagacctgcggcggagcaccagccacagtccccgattgctttttcttgatcttcttgccgccgtgttgattgccgtgggcatctccgtcgtcaacaccatggatctgtaacctgtacgggcctggttaggaaacctgctcaccccacgaggcacggccagagatatgttacctggctgctttggcgcgctcttcgtccgtgataacatggcgatccagcacatccaacgacgggatagctcgaatgacctgcaaacggtagttttcttcctcgacgacggcgttgccgaacagatcgaggtctcgcaagtgcgacaggcgactgagcacctcgagcgtgccctgcaagtccttgagtttgttgtcgtacaggcgaagctctcggaggaatttgaagtgcggcagggaggagccttccagcgacctgcaaggattcggtgccgcgtacacgttaacctgaccgggtattagagacattaaagggggtgacaagccatcgcgtaccggatgcagttgttctgagcgtagagctgcttgatacgaaagcagccgtcaagcccatcgagctcctggatctggccagagcacaaggttcgtgaggtggaatcgttggagatggagatgtgacgcaagcttgacgacgttcgtacctggttgccgttgatccagagcacctccagattcacgaaggcgtcgaagttggcgagtttgtcgatgcgcttgttggccatgtacagctccgtgcagtttttcacatacttgtggttcttgatgggcagctccgcgtgcggatcggcgagccgaagcttccgtggagcactcgatagcgccattcgaaccgaatgaccgggtgaatgcaacgacgtaagaccagtgcagatttgacaaccttttttataggcgcaaggtggagatatctcgtgtggcaatgtctgctatggacagctttcaacggatgcccgggagcggcatttttagcggtggttgttcaaggccagacttcaaaaacgtaccacacaaagcattgacccacgaggtggcaaggcactgttggtaacgagcaagatgaccaacatgtacgcgtcgtacaacaagaccaacagcatcggggcgctcattggcaactgggtggaagaagacgcgctgcaggaccgaacgggctactcccgacgaaaaatccctgctccactattcgcaccaggtgagttaagagcttcaaagtgcctcgctttctcctgctctaggaacttactaaccaactgaattaccagatcggaaggagtctcgcatcgagtcgacccacaagcgcgttctgcttcacgagtcttcggtggggctgacctgcaacagccacgcgagtgagatcacgcccccgcccttcgagacgacgctccaagcgagcacgcggtacgccgacttcgctgctgaaaagcctggccccgggccgcgaagctctctccgagaccagtacttggccgagacggcgagacgcctgcacagtgaacagcgcgctcgagagcgtgaggaggaagaactcgaacgtcaggcggccgcgcggatcacagtgacgaaaagctccttcctgcctatggatacgtcggcgctggcgatgaagcgcgtccctcgaggccgcaatggggcgctggctcgtcaggttgaccgcaatgtccagcacttgaccagagcggagaccgacagcattgaccagatgaagctggacctcctgaagggcgcccccgtcaccaggtactcgtacgcaatgaccacaggcgtcggcctcgacttcccgaccaccgtctcggacggcagcaacgcctttggtcgctccagcaccttcacgaacgagatcaatgatccgtccaagcgccacggagaggccaccgagcctggttgtctgcacgacgagcgcaatggtgcgagtgtgcaccaacgatcggcactcaagagactcctgcacttgctcaagtcggaccctgacacgggcaaacgcctcatggacacgctccgacacggctcagtgaaggcgaaaggtggagagcagccgcaacaggaggacggacgcgaatacatcgagctgcacgagttccgagcagctttctcggccactggagccgccctccctgccaatagcgccgtccgtgggcttccagccgttctgacggacaaggaagtgatccacatcttcatgtacttcgacgccgacaacatcggcgctatccagttagcagccttcatggattactgcgctagtggtggcgagaagctgcccttcaactcgcagtaggtgccaatgatgaacgaacgcatccatactttctagtacttccatttcactgcttcaaaaaccgtttgacctctgcagagttgagaaacttggcgtacagcggcgcgatgtcgttgtagaaggggttcggcccgctcaacgtgctctggcgaggcatcaccgccgatggagttgtagtggtagtaggtggagttggctgggaggtagtggagatggcaggtcttgtccctcgtgggctattcggactgcgtacgcgcttgttactcgaggcgatcgtcgcttgagccagggatcgaggagttcgaacgacgtcctccttactcgctgcccgctggtcagccgtcttagtctcatttggacgagattcgtcaacggattcgactatggcggtcgcaaccatgtcatcaacgatgcctgcagtgtcttcagaggccaacgcgcttgattcctccccagtcacttgagtccgtggactcggtcttgttcgactcgtatccgagggcgggcgcggacttggcggcgttggttccggcgcgccttccactaccggattgcaccacgatgtattgaacttccgcttgcggaacacgggtcgaggcgggcggggcttcaccgcctgcaccgccgcatcgtagtccatgaacagcgctgacggtgggtccaggatgtgctctggctgcacgaccggaggcaagatgatcgctgcggtctcccgcgaagtcacgatggagtatcgcgggtcatagtgcgtcggccctggctccggactcgagctgcgctggtcagacgcaacgttgcgcagtagccgccgtaagagctgcttgatggtcatggtcccgtccggtcggtgctctgcagcgtgccagagctcctccaggtcgcgcatcaacgcactggggaacaccatgcggatcgcctcaacgaaagactggaagcggagcgcaggaacggtatccgttggttcgtttgtgccctgagtcttggcgctctgcagcctgaaggccacgcgcacgccccgacagataaactgctgcgtctcgcgaacactgcacaggtattccagcagggatagcagcggccgaccgctgactcgcgcctccatagcggatgtaggttgccactgcagcagtcgagggtccttcatcaatgcgtcctcggcctcctcggacgatacgctgtactctgacacggagtcgacgcttctcgccttgaatgaggacgatgaagactccacgagagacgacgaagccattgcgctcttgatcttgggcagcatgaagctcgacttccgtcgcagtcgctcgatgtcggtctcagctaaagaggcagaagctgctgcagctccggagatggctgcagccgacgcggcctcttcggctgccgtagctcgagagaacaaagcgtgagagagcaaccgcttgcgcttctgccagttctgccacgacaggaaccacgatccgtcactcacgcggctgaactcgacgctgttcaacgccaccagtacagtgtacaccccttcctgggggaaagctggggcttggcacaatattcgctcggaagacacgaacttggccaccacgtcgacgtacgatgcggcctgctccggtacagcgggtgatgatgtctcgctgttagcaactggacgtttgtcgagaaaactcgcgctcttgactggtgacaacccctgcgtttgaggggccttttgagatgcgttttcctcttcgattcgaggagtggcttcctgctgctgcggctccgtgtagagctggaaccgcacgatgattttaccagtgtcgatgaatccacgaccctcaattacgacggcaaagcccccgtaaaccggtccatccataggcgagaccaagttcactgtggggatttctcggtacacattcaaagacagtggcgaaccggtgaactatcaaacacaaaatactcaagttggtcagtaaaactatgccttagaacgaacgaacgagccaaacccacaaaagtgttgaaaacataccgcgttgtgtttcccacccagccaaatgtcaacgaggatgggggacgccatcgctgtggctgaatgagcgggtgatttttctcgtccgagcgatgatgaggcttgcagtatttctctcggaatcgggcagcgcacctggccgttctcacagattccacggataaccttccggccgcgactgctgctgaaagacacctggacactggcagcttcgtgttgtcctcggttgttgtcttccatggaggttgcagagatcgtagcggtgaggttaatgcctctcagctcgagctccaacgtcgtagtggccgacacccagctcggaaagagctccgttaatcgtggggactggaacacacgcagttcaccgggacactgcacaaactcgacgccgttcatggccaccgcaacccgtacgataactcctctcgggaaatcaggcacgctgcactccatgcgtgtactggacacgacaataagtcgcgctgtgcggacttccggatctacggcttgggtggtaaagcgcgctgtaaacagaaaacattgtaagacacgttaatgctgaaatccacacgaaacccaaaacttaccaattgcgatgcccgtgttggtgaagtttgtgccgtcaaacgtcaggtgggaggtgtaaaccccatccgtaggccgcacgcgtgtgattttaggagccaagtagacacggatctgcggtacgagcaagtagttcccctgtctggttgaagtaaccagtcgagtcggggagaaccgaccaggttgcttcgctccggttgaatcagtcgtcctagttcgtgacagtttaattaccttcttccagtccacgacgtactgtccactgaccaaagccaccgcactctccgacgcattctgcgcggttctcctcgggctcttccttggaggttcctcaaccatattttcatcgctctcttcaatgcgttcatcagttctgggggttgatgccacaggctcggagactagcgcggttgcttcgagtttcgtaagctgcttggggagtgcgatgctgtcgaagtccgtaccgttcacggacacgtacacgttcacataggatgactctgtcgccaagtccagtagtggcggcgtagtacagaccagactggtgctggagcggaacttggcctccacgaggacggtgcgatcactgcggatcgtctgagtgacgccttcatccgagagtaccgcgaaggctacccgtaaatatccagagttgacaaagttgttccccgtaacacacaggagcgagccgccactgatgcagacgaacttcggctcaacatcgagtacaattggggtcaagatcgagtagcagttcgacggcgctacggaccaaaagtcctgaccattgagggccaactcgaccgctagctctgtgggaacgagagatacgggcgccccacgctgacggaacgcacgaaggagcttctccttcttcgcattgagcgcgctctcacctcggttcttccctgccgagtgccttccagactgcgggtgagttgagatgacagagatgagggacgagcgcaacgccttcttgttcttcttcatctgcgccacaggaggcacgaacgcgatcgcgagctccacttcgcccaacgttggcgctgtgactggagctggagctggtttcttggactttgactgagactgatccacaaccacctcttcgttctctttccgcgcgtacttccctcgaatgcgccgcagtggaaaccacgcgcgtagagcgaagggctgcgctagttgctccttaaccgggaacgtgagctcgacgtgtccgagactttcgctctggtccgcagttagttgactttcaagcaccacgcgtacagacggaagactcgctgggtcacctcccaccgcccactcaaagtcgaataactcattccacacgggggagaaagcgccgtccttgcgcgtgctcttgagttgggtcttgcctacgtacacgaccgcgaacgggttgcacgcgttcttcttggacgcgcgcagaccccgcgcccccagtaacgccacaaacacacctgcagtacgagtccacagcttgggcgggccattcaaacgtctaggactgaacccgccagcgttgcctccgcctcgaagcctcggagttggagcgaaacccggtagtacagacaacgggagctcggtggggaccgcgttggtcacgttgaagcgcggtactaagcactcgaaccgcgactccgacaccagttgagcatctgacacctgcatctgccctcgacgcttgaagcgcagctttggcgccagcttcatgctgctcacggccctctcctcgaagccctggacgatcacttcagtggtcgaaagccccgatacgagcgcggttaatggagccacagacttgatcactggcgtcttgtacatgacgaaggacacttcgtcacgaccgaagcgcgggagcccttctaccgatgaacttgcagcccctgactgagttaccagcgccagttcgacgttcacagcgatgctgtacagcccaaacttgctctgaggcgagtagaagtacactgcgttttcgtgcgggtagaactccccgggcaccatcacgtgctcgaggtctcgcgctccacgcttccacgtgactcgaactaagggcgtcagcccaatccgtgaggacaaacacgcgtcgatgttggtgccgtgcagtgtcgtgtacgtgttgcccgagatcggccctccctttggagtcacagcgctgatactgaacatcagcacgctcgagacctgcgacgcctccgtgaacgcgcgtccgtcgaatgacacggagtagtagacgttgtagctcgtcaagtgcgccggcatcctgaacttgacgctcgtactggagatgaacgccccctccacatctcgggagaaatacgccaagaagccgtcgttcgtgctctccgtgcgctggaatcgcttcacgcggttgatgatcgcgagcgcgcgctgctcttcttcagcattcttgaaccggttcttcttgaacgcgaacaaccgcacacacacgcgcccgctattgacgaatccggtgccagtgactagcacttcccctcctcctgatcgtggtagaacgctcggggttgtcagcgtcacggtgggggggttgtacaccaggaaggactgaggggtggagtagaatccatcccccgatgacacctgtacgtcgaggttttgaggtgacaactgtaagagcagcggatacgggagctggcagatgatgtagtccggattcaacatcaacggcgacagttgaagcagcagatccacctcagtcgctgagccattacccgccgaaatcgtctcgttgccagcgtagttcccgcgcttgaagtgctcctcgaagcgcgcagtgtagcggcggatatctgcagacccttcttgaatcctgctcaacggcacccaggcctgcgcgagctcgaggggcttcggaagcgaagactccgatagctcggcagttatgagcagcggcgcgcgtcggtccgaggcgatccgaacctcgaattcctcctcccagctcaagacggaaccggacgaagtagccgcgaagacgctgacctcccgacaggaagcgaagagtctttggtcgccgcactcgatccgcagcgtgaaggtgaatgtcgtccacgttgacactcctgtcacgatagaaccgccactggtggttccaccgacaattgagctcaagtacttactctcatcacgttttgatgacgatgccgccgccccattggcgccggtatttggtacttgagtgccaattcctagcggagctagcagcgatttcaagtttttcactgcagagatccgcagactcagcacgtgaacctgctccactctgccggacgaggtgaagaaccgctccttatcggacacgcgcaccacgatcttgcggttctcgacgaagtgttcgcctttgagtcgcagcgtcatggattcttgcagctctttcgcgtcttgaggcgaaggaagttgcccgcacggaggataaagcccaagcacgcgccagctccgtgggtcatagcagtgaaccatgacgctgttggagaacacgacgcccccgcagctcaccgtgagtgtcgcggggccactgaacgccagagttggcattgtgcactccaaagtcacggtggggccgttcttgatctgcggcgagagcgacagcgccagcaaagtctggaaattgtcggaccctgagagcacgagccgtgcccgcgacgatgcggagctaccacgggtcgagtcggcgctggtgaagtcgaacgtcacggggactgtgtacgactgggacgtcacagtgttggaacgcttgggcgacaccgcgagcttcgttaaagtgcccttcaaagtcgcttctgcgtcttgaatcagagtgtccacaggttcaattacggttcgtgaagactggggagttgtgctgtttgggtcgatattgggctgcagtcgagctacaacccacactgcggattcgactggaggaccgcagagacacacatggaccccgttgctgtcggatacaagcacttggacgttcgacggtgcgtctctatctgttgagccaaagcgaacgcacacgtagcacaagccgcacaccgcatccgtgatggccgtctgatccagggaaacaacaaaacttcttgtgttttctcgtacttcgggctccgacgagactgcaacaccctccagaagttctttaccactggggtcgacgataattatgcgaatttccgtcgaacttgggccaatagcagcgatgttgagctttgaaggagcaggtagttgagtcattaccagacacgtcattgcgtttgccgatactgcttcgtggtctgcggacggctcatacactgtggagtatgatgaatatccgttagacgacggtagagccgcactcagcagcacttggtcgccccagttgtacatgtcaaactcacagcgccccgcatcatctggagaagctttgccgaccacgcactggttgtccactcgggtcgccgtcaccaccacgcgcttcaggagttttgcattcgacggtactagaaaaagttgcatggagtggaataaacggctttgccaccgctcaaacggttcttgactcaagtcactcttgccatccccattagttgcagcctctgaagcttcgtcttcttcttgttcgctgtcgtcgtcgtcgtcgtcttcttggatcgtggtggccgcttgttccttcaagtcctgtgggatctgtggcagactcgacctcgcgtgctccagcgccacactgcgcttcctcagcccaaggttctgaatctgcacgtgcttcttctcggctgtggtcatgtcctccggtgccagatacttcagcaccgttgagggcgaacattgcagtgcaaagggactgccgccaacgttcgagcagaagcggaacgtcgcttggtgaaattcgtccttgatggtcatcgcgggatggaacagcagctctcctaggcgcacgaactgctgcgcgttcggcgaaaagaaaacctggacagctcccggactggaaaactcggggacagtgcacgatacttcgttggcactgacaaccttcgctgcgatgcaaggggacgactcctccatcgctggtcgaggagaagcaggggcttcgggagtagctagcgtgttattcgtcgctatcccagcaattgcaggacgacgcgcagatgatggagtgccgcttacaggcgtcataggtggacttgcagcgataatctcgttgtccgaggacatggcgctgttcttgaagtaggtgctagagcgtctcagcgtcgacagtctctgaagcttcggagggttgggaatcaccagctccgtgcgcgagtccgtctcgtggagcagcacaaatgagtgacgtcgtttagtgaccagagggtttgaatctacgccgtcaaagcggaaacacacgcgctcgggggagtccgttagcttgaaagactttggtagcatcacggtcaacacccgtgaatctgtagcttgacgtccacctagacactgcgtcggcaggtgcctaggcaaccatttgacctggtgcggctcgatctctgggtagtagtggaatcgtacgctgtgtgcaatgaactgctccccagcattcagcgtaaagtccaccagcaccgtcgccccaccttcgcttactgaagcttccgcgttgccacgaggcgtattcttgactgtcggacgcgtaattcggagagttccgagagcagctaattcattgtcattggttccgtgagctagagccgcccgctgaacccgaagactctgctccgctagcatttgatacgtctgcgtgcgcaccttacccgccgctgcgccttcacgcatcctaggggacggctgagcttgtgggggcagcaaggcggtgctttgaccgggtaaatccgagccgctggacagcgttttgtccacgaattcgactggcggcgtgttgcagatgataagcggcgaggcactcgctgaaccgccaggaaacgtgcgactgtatcgagcaggaacgaggacgaactcccgttcgttgacactggagcggaagcgtacgaagatctgcgctgtatcgaggatgttcatgccttcaatgacgagttgagtgccgcctgacgttgggccgcagcttggagcgatctcggtaatgcttggagattcgtacgaatagtatttttccagatcactctgccgcacgccgaagaggtgacacgcagacgaagacccactgctacttggtagtagaatatccacgagagatacgcaggcgacgcgtagtaagggggctcgacacgtgacacgagcgttagcgtggtcgatctcccccaccatgcagataacgtctgcagcgacgttggtcgtcgccttgatagggctcgtcccaccgttcgggtttgaaggcggcggacgcatgaccctctccacccctcgaataggcgaaaactgcacctggcacttggtttctcgtgataaaatcttcagtaatttaccgccgagaaacaacacgacggtcgatccgcctgcagcaggcccggtcgctgtggccagacagaagggcgagccaaagtgtcggaatgggaggagggcggtgcacgccgtcccactcaagttgccgaatgttttgctgacgtagagagactgtgagaactgttgtccgtttagactcgcctcgagctcgtaaaaccctgggggtgcggctggaaacacgcactgcaacgcgccgtctcctgatgcagaagctgcagagttggcgatgaactgcgcgtcaactacgatgccgttctcatcgggttctttctcgtcctggagcgtgaagcgaaccagtaattgacagccgaaatcgcggatgtgctcaccttccagcaccagcgcgtcgttggctccttccatcgcagcccaacccggattaatccgacgaagaatcggctccacgtagtacgtaaactgcagcgggctctgcgttgaagtgtagttgataccgttcagcgaaatactcagcacagccgtacacggaccttccacagctggagacacaaatcgcacggcctcaccgacgatctctccccggaccaacatcgactgtagtgacgtcctgcagctcagcctccgcttctgcggcggtaatgacgataatgggatgataccccccacgacgctctctctcgatcgtcgtttagtgatcggacgctcaaactcatctctatacagctgaatggagacggtgatctcgccagtctcaacgatgcttccacaccacgccagcacctccgtcccaccgcctaccggaccggctgaaggctcgatcttgatcacaccctcaggcggatcatagaagaggaacttgatccgtgtgtcctcaaacagttctgcttctccacgggccagtgaaacgcgcaccccaaccagctcattcgaaggccaagcgggcgtaatacaagagattattcgtgtctccgggtcgaattgggcctcgatgtcgagtgcgtgtggagtttcttgccgggttctctcgctttcgaaccgcacgacgcactgcagcagctgcgtgagactcggaagcccctttgtgtcctcgacaaagaggcgtagaggagtttgacccgagattggcccacacagagttccctttgcactgtagcgggtgggcgcatggtactcgaagaagcacgttgaatcactgaactgctgcaggttgtacgacacgtggagaaccacgcgacccaagcgcattgacggcggggaaatgcatcgaatagtctcgttatcgaccacttttgcggtcacaatgatctcggagtcaccgtcaaaggcgtcactgaactgagacgcgaagcggacgtagatcttggtgtccgggacgaatcccatgcccttaatgacgaccacagtgccgcctgaggtcgtaccgaaggcgtagacgcgctctcgaccagcgggagggagtacaaacactggaagtgggaacgcgtggaacgtagcggcggaactcggaggcggctcatcgttatccttgggaggttcaagtggtcgttcaaccagcacagccggctcgtagtgctgctcattgaaggagatgctgatgttatgggatcccgcagtcagctcgggcgagaaacactccacgaatcgctcgtcacggatccggccgctcatcgggaggctgtcaccgaagcgaaagtcgacggtgggggtggcgatgcgctcagcgaactcgaaagagacgagcgatccactgcagacgtatcccacgcgcgggttcatggccacaagcgtcgcagctcggtagtagcggaatacgtaggggagagacgtcggttgtccgtccaccacgctgatctgcatgagaactcgttcgggtagaagcattcctccagctgcatcgcctggaacgcggcgatctggcgatccattcgttattgttggcgcacaagcaacaagtggagcgaattgtcgatctggactggcgcgaagctgaataagtgaggggcaagtccaggttagacgctgtcgcttggcgtttacctcagcgatgactgtggtgacgggtacaggtgctaccctcgcagcggaacggcgtcctctagtctttgtcttggacttctccacgacagtcgactccagatacaacgtcaacttgacgacatctcctggtcgcatgtgcactccatgggcgacaatcttcgtctcgcggtcggacacaccgaataaaggggtcgcagacgtgagttgaggcatgttgtacactcggtagtggtctcgcaagtttcccaccccgtggaagcgtaccccatcaaacgatacctccagatacgccgtagttaagacggacagagtctcgaccagcgtcctcaacggcggaaccttaaaatccacactggatgaagtccaatgaatagcttcaataggtccaaacaccacctccaagtcctccttatctgtagattcgtgctcgatgactgccctgttgacccccaagcgaatacgcacgagcattttgtcggtcacaatcgctggcgtaaggtacaccgtcaaacttacaggcacttcaaacgcgcctaggggtggatccacgcgtgtgatcccgtacgtcgaaaaatacctaagaggaacagaagtttctgaaaaatcagccccgttcaaggcgacatccacgtaagcgttttggttcgcatagtcatcggaaaacagaggcgtcttggccgtgataactccgtcacgcgctgtaccggggacatccttgaagaccaatcggcgtcctgatccatgggcgttagcgggaaaactcacgcgcactttaatccgctccgtttcaatcaaattggtgccaaatatcttcagttcactcaactgccgcacacacgcgcacagcggactgatgcgcgttaccgtcggtgaactgtagaagataaactccagtggcgcatgcgtctctgggtcgtgcagctcgcacaatgtgtattgttctccattgagcgacacgaagacgcgcgcaagcccgacgttgaatgcaggtgcgcagcatctcaactcgcccttctcaacgaaagcagggaccttgcggctcatcgtcggcgactcgaaaattacggacggttgcgcgccgtggtctatgatgtattcaccttggaggcgaatgtagctaccgccgagtatgtctgcagacagaggaatcgcagtgcgcacgatcggaggcgggtagaacaggaaacacaaatacgacaggtccttggctagcgggttgggctgagtcgtcgacggtgggggatcaatcgcagggaaataggtgaccccagcgtcgtacgagacctggacgatagtcaagtgaggctcgttactcgtgctttcatcagcccacggaggcgtctgacacgtgattaagtactcggggtcttcgtctaggtctcggcgtgttagtattgcctctgatggcgtagtattgttagcgtcgttggaaggggttgttgccttttcgctcggttgtgtcgcggtgtggccttcgactgtcatggtggtagtgaaatccagggtcgagaagcgcacaagcagcttcagcctcggaggaactttgtgcttcatccgtaacttcacgcacgtatctcccgacgcaggcccgtggtgttgcgacagcgatcgaatcactggaggaaggtagaacacaaacggcagcgcgccctggaatatctcgccgcccaacgcaatccccactgtaaaacgccacatatacggcacgctatgtctatccgtcgtctcgctgcctccacccgatctcaaaccattcaacgccttaatatgatccataaagttgggcgaccgacaaattaacacccccggcgtatcggccgaagcttcagcagtcaccaccttggccagagctccgccaacgtcacttaaattgtaacttatgggctggaagcgaacttttatacggcgcggcgggtcaattcgctgcagttggtaaaacgcgtccacatcttctaacgtcagacacgcgtggcggatcacgatctgcgttccccccgctagactgctgctctccggggagatctcctgcaacgcgcggtcccgatgtagcagccccacaatgcgcgcctgcccaaactgcctcccaccattcaacgacacactgaaggacgtgcatccaaacgacatattggacggaaccgtgcagcgaacttcgttcttgccatagtacgttgcgttgagctgcgccacctgaacctccttcgagttcgccactaccttcttgacaatagctccatctccatcgccttctggcaccaattgagctggcaactccctctgcaacagcgccaccacgatatcccccgtatccacgaagccatccccagtcaacctcacctccgtaacctgtccgctcgtgacgctgatgcacgcgggctccaccgctcgtaaagtcacgtctcgaatcacacgatagccataggcctcaggcggggcgtcactccgacatcggaagaaatccacgcggttcagactgagctccacgctggcggctccaaaacccatcgtggctgcatcaaactccacctcgtagaccccaaggggcgacaacttccacttcccctctctgatctgctccgacactgcccccgtccgctctgacgcttgccgtacacggacaaatacaggtaatgcattcatctcttccagaacttcgagcgatttctgtccacttttcgctgtcgctcgatggaggacaggagtgggtaatttcaggatattcagcgtcgtggtgacggccaccgctgggttggtcatgaggacgctttgaggacacacgcgccggatttctagcggctggtgcagcttgaacgtgagtgcattagaccgctgttcgcccccgttgaggatcacctcgacgctcaaagggaccaactgcggcgcgctgttaactgatgcggaggacgctgcgagactcgtgcgggccgcgatggcgcgcttggcttggcgctcgaagctcgggaggacgcactccaactgcgtttgcagcaggaatcgtccactgacgtccaccgtgttggagatggactgccgcgaggaccagaacatgtggtcggttgagtccacgtggacgctctcgtgctggacgtcgctgtcctccgggtcctgcaggctcatgcggaagcggacggtcagcgagtgcggcgctggacggaacccgacgccgtgcagcaccacgcgagtgccgccggacacgacgcccacgctcggctcgagcaggcgcaagcgcagagaggcggcgggagcttgcatggagcgtggattatggagctctctggcttggacttgacgagcctcgcgtcgcttggcgtctctagagtctaagactcgaagggatgccatgtgcaaagctggcattatagcctataatttatagggtttgttatcgctaaaacatcgctgccgaaccttatactctcgaagctccccaccacaaacaggtaatgtacttgcaaacaaaaaagcttcgacctgctttatgcaaagcaagtagaatgtgaagatgtaaacgacatacgtactttgctctccttatttgtagagggtttgaacgcaacctcataataggctagcctcaccacctacgatgcctaacatcgatcggtgagcgtgtgcaaacgtcgatcgcgttttgactctggtagtcacgttagatgtcaacttaccagccgtagcctttgtcatatttttaatattaaaagagtaccgccaaacagccactatcgtgagtacaaaatacaacattggcattcgtcaacatcgatgactgctttggtatccaagtggcattcgtcaacgttgatgagtgctttggtatccaataccagtagtatcatcggtgagctaaatatcgttgcgcgttgcgtgagaagccccttcgagattcacgccatcgataggatacgggatgcgccctcctgtctgaaggtccgaacactttcaactggttggataggatcaatggccccctggtccaagtgaggcatgttgccttcacgcaagatttcctagacccagcctgtgctgtagttgagacttaccactcctgagagagattcacttcaggatttaccgtcgacctcaagcgaacctccacgccacattactccactccaacctgccgttaccacccaccatgcacctgagctgcatcctcctcgcggtggcaaccatcgtggttgcaagctcggaaggctctataaaagtttggacacccctgcgcttctcaagaagttgtcaatgacggagctgacgaagaatgaccgctacctcttttggagagcgtactcgaagtactggaacaagcatcatgcggtgctgacgcacgcagactaacatttctcaacgcggtcttcttaataatcgtaatagaagttcatagactcgataagctgcatgaatgttcatttcgctcgcatcaaaaaataaacccgtaccagcttcatgtatggcaggtcaaatcggtcatcagttagctgtcagtgctacgtgtcttggcttttgtatgaccctcaagccgtgatgctattttcaacgccaaatttggccaaaacaaaaacaaaaaacaattcattatttcaaggtttgttggtgtattccgagtcgatgtccaaacggcgcgctgccttatcagattagcgatctttcgcgggcatccttcatcattgcttgggatgaggacgaggaaacaataggaagtgagccgtacagcgatgcctgctacaggccagcagagagcggacgtggagctgaagactgccgcgatgttggaagagatgatcaagtccacgcaccagctggacgaaatcctccagcgcctgtgcgctgcagactccacggcgacagtccaaggcgagcaaaccatagcaccagttgattcagtaggtgtgcaggacgcagacagtgactcgttcgaggattgcatcggaagtccgacaagtgacggcgtcgagctgacagcagaggaatacttccaggtaggacgacaaagtgttgatagtcccagccttatctatgaagtttaagctgtcctagcatccacgacatcaccccacaccgcgtcgcaaactcgcacacttcacgagtaaagtcttgtcgagcttccggcctctccggtgaatactagcaggttgttgaactctttggatgcaggaggggaccttgtcgtgcgcttcgccagttgtacgcgcgacacatcattcgtcttcccatcgttgaccccctcaagtgcagctgctgagcttggatcggacggggcttcgacggtgctgcccgtggttgcttcaccgccaccggagaacaacgtttcgtacagctatttcgtgtccagactgaggcacagcacgcacggcgctggagaacacggacttcggcgacgccaatgtgccgatgaaggacgcaaacttccagatgaagctcggcaacgcttactacgcgtaattcacggggggaactattgtcgtacaaaacctttaataaagttatccaaacaagctcactatcttcgctcgacagaggctgaattccaagcgtctatagccgtcgagctctttctccatgacccagagaaacagagcgacgaatgtacggaccacagcagaacgaacgctgatcatcagagtaaagtgggtagtcacgccctaccagtggacgcctaccagatatacattaacgggctgtcataccagcagctgatatgccgcgtcatatacgcgcatagatctcgcgggacgcagatatcgtctcgataaactgccctaccccaagatatatgccgtgtagccatcataaagttttgtcttgttgttagtatactttatgctgaccatcattctaacatatgcatccttcactctacgggcatatcgatgatcatatatcttccgccaaatcgaaaagacgctcagttgcgaatttgccgccggcggcgcgaagtcgacagcagccaacacttcgaaaggtgagcgtggttgatggctttgtatgcacttctctacgagaggactcacctcgtgtttgattgcagggacaatggtgcgcttaatccaccccgccgttcactggcggcgtcggtgcatcaatgacacgtccagcgaggacgaagagaacacgccgccgaacatccagcccagccaccagtacgaccgcgacatcaagcgccgcatcgaagacgccagcgagtccgccagcgctacgggcacagcaacgcctccgtggctgccgccagagagaagccgccccaagtccaagttggcaacgaacccaccgccaagccaggagtcgacgtctgcgcccgtgtcgccgccggtgtccagccgcccgtacgccagccccaccacgtcgtcgccggtgctcctagagacgccgccgagatccccagcggcacttcagcctcgccacgagggccgtcgtgcgcgtcgtgaagctgccgcgccttacgctcgccggcagtcggcgtggcgatacccgacccgtcatcaacccacgcggggcgatgcgagtcactgcggacggatcgcctcggacgcaactacgggggccgcggtcacgggatcggttcattccagcgcagtagccgcaccgcgtgattcagcttcgcgagctgttcaccccgctcgcgacggtatttccgtcggtgcctcactttgggtggtgcgactgcccatcgccgtgccgtgtggactcctgccgcaattcgctaatgcatctctactgcaatatcaactgctgcccgaacatgagagggctgatgcgcttcgtaaaccactcgtgccaaccggtggcgaagttcgtggaagtggccaacggccgccgtaccaccgtggtcgtggcgtcgccgcaagacatccaccgcggcaaggaggtgatagtcgactacgacgacttgtggtttgtttgccgctgtgggccggatggctgtcgccaccgcaacattcaagacgcccaagacccgtgagagggccaaagagtgagcaggacgagagagcaagcaaggtgaagagagagaccagcgagaagggggagggagcgaagtgaaggaggtgtagttgtgtaggtaagcgtgttgtgaacaaatgaattgcattgagataacctattgctgtgcggttgttgatggtggttgccgtgagtgcaaagtagcagcaggctagcaacaagcaggtaagcatgaaaaactggcgccaaggctcgcgccaaacgacgggttgatgggctcatcttcgttcgaagttttcacgtacactgacttgctatttgcgggcgaagatttcgcgcgcgcagcgttgaagttgtgagctactagcatcctttcaagatcgatgcgaactggtggcggcgaagacaccgccctggcaagctgccgccgcggcgaagctgtcgtcgtctctcacttctggttttaccacgttccgagcagttcttccccccccaagcgtgtctccgccgcctcgcctctgcccaccactcccggtacgacgcgccaacacggtccaacgtggcaatgagcagcgtggctgactttttattgattcgtctgtgtgtgtagatgcccaagcactctggaaccaccaactactcgacggccgatgtcgaccgcctcctcacactcgtcgagaagatgctgtcgctcggcagggacgagtgggaacgcctcgctatgacgtacaacgccaacaggcctcgaggctcgcccgagcgagacttcgagagcttacggcgtaagttcaaggtgcttcacagcacccggaagccgaccggcgtgcaggagattccccccgctcatcaagaaagccaaggaggtcaagcgtgccatcgacgacaaggccaacgtcgtggagatggacgacgagaccgacaacgaccagcccgacttctgctttgaagtcgatccggacgacagcttctacgagggcggcgacggcgagggcgaaggtttgggagtgcccactgccgccactgtgggcaggtccgactacggcgagtcgccgggctccgacgagtcggccgaggctgagtcgacggcttccagccgctcatcgagccgaggcgcgttccaagacttgctctcgtcgccgctgaccaccgatgatctggacgagcttgcacgcacgccgcgtcctgctcctgtccgagcagcgccaagtacacgtcgtgctggctcgggagggctgccggcaccacgtaagacggctgttactgcccccagtagtgatgcttcacagcagccatcgactcaaggtgccgccgctgccaccaaccacgatgccgccgaagcggccaagtaccccaagctccacaagacgtcgaaccgtctcggaggcgtggacttggccggctttcgcgacacggtgggcgtcaagcgcgctcatgaagaagacaaagacacggcggaagctagctacggttaagctaagcgcatccgtgccatgaaggcaacaacagctctcaagacaaagctggatggccttgaaaacaacgccagcaacatgcgaggaggcatcctcgagacgcttctgctgctccgcgaagagagcgagcggaaggctcagcgccgccgcgacgaaaaggcggccaacgaggcccgccttctggaagcgaaggctgaagctgaggcgcgccgccgtgaggagaagctggagagagaggaccgtgcgcgccgtgagcgcgaagatgcgcgcgcccgcactcaagagctgctcatattgatcggcgcactgactaagaaggtgtgagcggaaggcgcgcatgctcttcgaagtgaggctatcattcacgttctagttactatatacttgttacttaccactaagcctcaaatcaaacatgttgttcatgatccgctagcgtgcccgtcacgggttacgtgatcttctagcgccttcatcatcacatgtacttctcgtgctgcgtacacatctctgtgaagtcaagtgcaagacgcacgagcatcgagttcggctctccgtcgcaaaacgtttgcagcacgctgctgccagcaacatcgagataatgaagcagctcaattcaacgacaaagaaaaatgtgttgttgcatgcagtacaaacacggctagttcgacaccctactcgctggatagctccatctcgcctgaaaacgtcgtgcgtatctgcgagatgccgaccgtgcggacgcgatagttagccattctgaagatgttgttgattcggtggccacgaagctcggggtcgtacggcagggggaggttcaggcggctgtacaccttttgcatactccccatgcccatctccgccgcctgcctcacggacgtgatggcgttatgaagcgtccgcgcggagcttctcagcgacgggagaatcctctcgagatcgccatctttgaggagtcaggatgcgaccgaccatactggtcgaacacgggaaagccgagtccgacaccacgttcatacgtgtgtccgggcagagggtaaggtcgagcaacttggaacggaagcccaaggaggtgtcggagtctttccacgacccggggcaattgtgcttacaccaaatgatgcagccgtcggctgtgaagcagattgtgccagtcacgaaaacggtgtgcaaccacccgttatacatggcgttctgcgagtccgcattcgacggctgctgaacctacaatatcattgatgttagcattctatcatagcaagtaacattttacaaactacaactcacccttaagttcttcccatcaatgaagccgaatgtgtgtttgagaagcggctcgcgggcttccacaagctttgcgagttcggcttggcgagcaggcgagggccaagagattctggcaggagcgtagccttttagcgccagcgacagtgcttcctcggcgcggcgtagcggcctcgatatggtgctcggcggagccccaaacatcatacacagggagctctgctccatcgacccgacgtagaagcacagcaccaggcccaggatctggtggtagtgtcggagcttcgggagccgcccgcgtgccgtgctgcgtgggatgtagtaaaagcggctgaagcgccgcagtagttggtggaaagccgacctgaaagcatgcatgaataagatatagcgcagcaacttcagatggtaagtagggtcgcacctggtcaagctcgtcgcgttcaggaagttgatgtcgcttccgcgcgtgtacaacatcatccacgcggagtcgcagggcgtgtccaggcactgggtggtcaggtagtgcctggtccgcatggcgatcctccacgtctcttccacgagcttgtcgtacacctccctgcgcacctcgtgcagcgtctcctcctgctcgacgaaggcgctagccagcaccagcaccacttgccgaattttggccaatcagaaatgttcctgacacacatgggctcagaatattttctccaaatggcgcgctcccattcgcgatctttcacggcatcactatttcggaatgggggcgacgaggcagaaagcgagccgtacagcgatgccagcggcagaccagcagcgagtggatgtggagctgaagactgccgaagtgctggaggagatgatcaagtccacgcaccagctggacgaaatcctccagcgcctgtgcgtgtcaaacggatacttagaagcctcccaagtggtatttggggatgacccagagaaacagagcgacgaatgtacggaccacagcagaacgaacgctgatcatcagagtaaagtgggtactcacgccctaccagtagcgggagagctatctgagctgcttgccatatcgcagtggggggcacacgatgagaaccccagcttggatggcaaaaacgtctcgagtccagagtgtaaacaaaacgctggtagctggttcaagaagattgagattgaaacggtacgttctgttaagcttgctctaggttttggtacttgacacgctagagctcactgttgatgcttgtggtgatgtgtttgaagccattcccaaggaaccgcatcgtgcaggcagcgtgcagtcgctttcacacacttttcctcaacgacatgggcttggtgtttgcttgtggccacactttggatggtgcactgggactcgggtacgaagtcaacggctacgtcgcacagccgacactcgtggatttcttcttcgacaatctgattgtcgttcgcgatatttcctgcggtggagatcaactggtcggggctcattctgctgctgtgagtcaggaagggagtttgttctcgtggggcgtgggcattgcactggggagagggactttgcgtagtgcgtcgacacctcagcgagtcgacttgccgccagtggaactaactcgcgatgggattaccatcacaaagccatcgacatcctctgttcactcagtttcgtgcggtagtgggttttgtgtggctctgacacgagacggctatgctttctcttggggcaaatggagtgacggacgtcttggtcttggtcggatcccaattatcgcgcggacgtctcggcggcatggaggaggggctgtgcggaagcagttccagtcgtttcagctcacaccaagacagatccacaacctctactcggtgggaacgaaagcatcgcacaacaggttatgtggggaagctctattcacgaaggtagcgtgtggagatgcccactgcgttggtctgacgagagctggggagttggtcacctggggaagaggcaacaacggccaacaagggcgaggcgacgccagcgatacactcgcacccaccgcggtattccaaggaaacagtcagaaatggtggcgtgatgttgcagcgggcgagaactggggcatggctctatcaaacgacgggcaagtgtggacatggggtgcttgtggcggtgcagtacttggccacggactctacggcagccagaaaaatgctcttctggctgaaacaatcttgcaggaccaccagcgactcgtttcgcagcacaagaagtccgcgactgccgccgtaccgtgcccgacactgccgtgtatgaagtggatggcaccgcaagtgatccgatgcttcgctacccccgataccagaatttgccgcatcagtgctggagctcagcatgctgcagccatttcagatagcggagacctttacatgtggggagacggatattcgggcgctagcatggatggctccaagacgaaccaactggctctctccagtctaccgaagcttgtgaattgcggtcatcgatttgagcaaggagaagaatccgttgaccagtttatcgccgatatagggacgcacagtgtcgagcacgtggtatgtggtggtcatcagacgatcgccttcagctccggcagctttcttgctcgttcgatgactaaactctacagggaggctatcgtccacgcacaagtcggtgatctggatcaagcaacagccatcacaggcgctgacctcgtgttggtggtatccggtcagcgccttctggtacacaagttgctgcttgctcagcggagtcccgttctgcgtcaactcattctcgacgaagagcagcagcagcagaatcgccttgatagagccgaaggtgacgcactcaaccggacagaagtcatggaattgctgcttcctcagctacgcgtcgacgttgccagagcgctggtggaatttatttacacggacaatttctcgatggaagtgaccaagacctcgtactatctggtgaatgacgtcctgcgcgctgcaaggctctacaaactgcctggtcttgctcgactctgccaggaacgtctcttttcctcttcgtctctctttggggagtctacttcttcaccagcgcttgacgagatggaggaggaagacgatgacactgacactgaagaaggcgtagcaggggaagacgtaggcagcaccacgcgcactttaaacgacgacatgaaattcgccttgagtgacatggcgtgggcagacacagtgttaatagcggaggggcgacagattccaatacatcggtgcatgctggtagcccgaagcgagtactttcgagcggtactcgccttccagcattcagcctctcaactcatgaatgatgctcacgacggtaaactggccgtcgtcagtgtcgaagactcgtacgccggaattgtacgcgtccttcgattcatttactacgaccaggtcacgctaccgaagtataaggaggagaataacgcaagattggtacacaacgacgtcgatgtcagtggcgacgatggcgcagaattcaacgttgaggaagaagcaagtgaccaactattagaagatcttgtggccgcggacaagtacggactcgagcgcatgaagcgcttgtgcgagcatgcgatctatgtgaccgtagcgaactgcctagaagtgcttgtagttgctgagctagtgcacgctgctcacctgaagcaggtcgccatgaggtttgtgcaaacaaacctcgcagacgtcaccgctcgtcgagaagagtttcagcatttccagcaagatttcccgcagcttttagaggagctatacgtcagccttcgcgatgccagtcgagacgagtttctgctacgcgtaagtatttatctgtcttgaaagatttcagatctggtgctaaactaacattttttttatttgatggtaacttaggagtggcacaaggaggtagcaacgagcttagcggcccagcgtgaggagcgcgagctggagtggggcaaaaaatctgcagcaccttttccatgggtgccgctgagcttggcagtcgcgttcggcaccatgtacctatccatgatgaactcgcaagagcacgagtattctgccgtcccagctaccaacttggtcgcgattgccgctatcggcggggctattgtcatgggatatctctagagaggaaataccaatcaagacatatacttcaaatacttcgtattaagtattaaaacaagcaacatgtgtctacagtttgtagacgtaatgcgacgcagtgttccgtcaattcatcacgccaatccagccggatgctgtctagtcatccatcctcccgtgcatgctgcagttaatcagcacttgtgctcctgactgggccacagaggggagagatactcgagccagatgagacagacgggaatgtcctccgagttgatgagcagtccagccagcagcaccatgggcatacgtagaacaattccaatgatgggggtgatatcagcacgccgacaaatgcatgaaatcatgtagccataccccaccgcggcgctgtggacaagaatcaccataacttgttggtagacgtacacaagcgcgccatgcccaatgtcgatcatgaagtatacggggaggaagaacaccattggtagtagaatttgcatgggcagctcactcacgatcttggccagataccacgatgtcacgtggtagagtccgctctggtactcgcgcgcgatgagagtgagttccaagggcacggagctgaattgtccattggcggtgatcatcgtttggctcacaaccatgaagaagaacgaaattctgcacgccagtctgccccaaatccagttgcaagtagactaaccccaatacggagctttccttggaagatcaagtgctctcgaactgtgagcgtctcgtagaagagatcgtcctgcaccacgtacgtcatgagcgctttcacgttgtcattgagtggggttccattcacagtcacacgaccagtgacgcgtcgattccttccggccagacagtcaaggagcgacgtcttacccgccccggaaggccccatcaacaccaccagctctccagagcgagctgccccactcacatcagccagaatcgtcttctccctttggtgtttactctcctttgccaccttcagagacaagtgccgccattccagcacacgagcgttgggtccgacgcgtagtcctctcgactgtcgctcgcctcgatgtccattggcgactcgatccgcacgtaaacttccggtgagcgtggcacgtagatctactcgacatacgtatcagataccaagtccttggtttatctgcgactggacccaagtggaagatagggcttaaagagaagagggtggctatgttgcttctatgtgtctgcctgtcatggtggacaaggggcacctagtgagctagtgacaagcctacaatgtcccgatagccctgagccgcgagcttctccatcatgcgacgcgtgtccgacgcagcgatacccagatcgttctcgatctccagcacccgctgggagccgtctcggaaggtggcgagcacccgacggcaggacgagttggcgctccagccgccgccgccgccgctgaggtgccacgcgttgcgcaccatgaactcgaactcgtcgtcgttggcgatgccagcgctcaggtccttgtagtactcgaggaactcgtgccacgtgatgactccgtccccgcgcgagtcggactgctcgaagacgctcatcatctcgagcatcgcgtcgcgtggcttcatccttccagcgaggacttcggggtgctgggaggcgtcgtacaggcgctgcacctcgtcgatggtggcatgaccgtcacctgaagtgtccaagagagcgaaggccttcttcacaagcaggatgcggcgcttagccatcgactcccgaagtccgcgcatgagttcgtcgatagtgatcttgccgctttggtctcgatcgaagcagcgaaacgtgcgttccagttcctctgggtccacgtcgcggatacccaactgggcgataccatcgcgaaattcctgacaagcgagagagtcacgtcaggtattaacggtgatagatgaattggccactaagtctacggacctctagctcgatcatgccgttgccgttctggtcgattcgtcgcaggatcacgcctaatgtccggatgccgttgttgccgcccgcctcgagtatgctttcacgtacgcactccagcagcgaccgagctcgaccagtcagcggtactcgaccggatacccccgtgactgcccgagcgaactcgacgtagctgagaacgccatcgagatccgcgtcgtagcggtcgaagagcgcctcggtctccgcttgcacccccacaaagttgagcgacagcatcgcccgcgcgaactcgtcgaagtccaagacgcccgatccgtcgcggtcgaaagagcggaagtgcttggccagcatcgcagcctgactgtgctcgtcgcggtaacctgaccgcacctcgaacatctcgcgcagcttggcttccaccgcatctactttgctgtcggtcatttcgctcggtgctgccgcagcgctgctgcgtagatggagttgaaaaatactcgccgggagggaaccgtcgctgagtggtaacgtccgatgcacgaatagatgtttgtttgagtttgacccgagtcatttacaaaagtgagcgactacgtaagcacacataggcaacccggagcgttgctccgggagggtacacaggtcgacgaatagtttcctggacgatgataacggataatagttgagtaaatcccaaagttgttttgtcttaatccttggaagcactaccagcccaactctctagttgcatctatcgacgggtacccgattccggcaaatattagctttaacattacaattaagaaagagagacccggtttggtacccggttttggaaagttacaagttttttgccgggccaagcacaggtcttcgacctgttaatttaatactccagcgttgcggggcattgaacagaccaacaccaagctatgttaactgaaatcttgccattgtactctatcgaatagcatgcgagctcacggaatctctagaaaagtgtgggcacgtacagttccgtgcaaatgtgcgaaagagcgccatcaggcgaacgcttgctgcgagaaagaagctggctggcgcagcgtccgcccatttgtcaattgattcatgggccattgatcatgctacgtaagcacgtaatctccacaaggggttctcatcacaaaaattatcctggatcgagcatgtgcttgcttcttgaagcacagcctcgatactttttagttctcgtctgcagtggtggtggtcatttctggattcgcagaacccaagccacttcgtatcgcgatgaagttcgccgccgtcctcttcctagccgccgtcgcgaccgtctccgccgaagcaagcaagccgctcactccagcctcatttccatacaactcgtccggttcaagcgacgtggactgccccgcgttttgcttcgccgtcatgcggcccgtgtacgacaccaacggcgtgcagtactcgaacgagtgcgagatgcgccgcgcaaagtgccagggcaaagagaagcgcaagagcatggaggaaatctacgcggactacaaaaagcgctacgggaagctcccgttcggtgctgacgcggacagcaaggggagtgatagcagcgctgctactggtagtgactgccctctcgtctgctttgacgtctacgatcctgttcacgacgagcaaggcaacacatactcgaatgaatgctacatgaagcgggccaagtgcaagaagaatgaagaaaagaccgctgggaactcgttgcgaggcacgacgaagaaagagaaaaactagcttcaatctgagcttaagcaactacaatgtctaagagcacaaaacttccaggtaccctagcaaaacttttgtttcacgttcttagcacattttggagttttttttcttcactcctgcttctcctgcagcattctcttgagctgctggttctgctgggccacgtacttggcgttgctgccggcggctcggcggatcacggtctcctaaaagaaacaaaataattattgctttttattatacaataattataattattgtactcaaattagtgtcgaacctcacgctggaagttggcgtcggcgcggcgctccgcccacttcatgacgtagtagccaccgacgatgggcgtcgtgaagtagacgagccccataaagcgctggccgttcttggacagagggatgcgcgtgctgtggatcttcttcttgagcgcctcgtggcgctcgcccagctggcggaagaagtccatcattgtctttcttttgacctcaaatagaaatgtgcctcaaataatttggcggcatcattgacgcagaattatgctggttacggtaccacctgcagtgaagcgacgcgagctcgcttcaagttgcccggtggagagctaccatggagggtgagtatagtgcagaacaagccgctgggggcgagaatggaggtgagtgcagcagaattaggtcgcagattgaacgtagtatatggggtgctgataattctgctgttaacaaaagtaggggcggagtacgcgtatccggaaggctacgacgccgacagctacgcgaattactatcagcagcagcagcaagaaggagaaggagactattccgcgtatcagcaacaaggctatgaaggctattacgcacagcaagaaggccaggaggggaattccgccaatgatgtgtaccaataccagtacgagggatacgaccccaacgcggatgggcgacaaacctatgggtattatgccaacggggaggagtacggcgatggacagcagagttatgcagcggaggggcaagaggcttggagctacaacccggaagaacctcagccgcaactgtacttggatcagctcacggcggaacagacgaccggctactactacgatgaagaaggaaacttggcgggggtacccgagtcgccgacgagcgtgttcaaccaagaaacatactgggagtcgaggcaggagagcaataacacgccgtacagtggagatccgacggatcccgggacgagagaggggggtcctcaagatgagacggacactgagggtcttggttcagcttcggttggccccaatacgcctgagactacggcaacccccgacaggaaaactccacggaagaagaagaagacgaacaaaaacggcagggctacgtcgccctcgaggaagaaggtaggaactttattatttgtggctggaggtgatcgatctttatatggttgtgacgaatttcgttatgtttggaaagaaaacccgcgaagagcgtatccaaaagaggcaagaaatgctggaaaaggaggaggaggaaagactgaaagcgctagaaatcgcagaagctgcacaatcagataacaatgcttctggagagggatctgcgactgtcgcgaaagcgcccaaactgtccaagaagaaaactggctttgtgaatcgagagaaggccaagttccagatgaagctgcgcatcgtcaaggccatcaaacgaacgcgcatgcccgtgcaaattcggatcctcccggcggtaatttattttctgaagcgctgtgttttggtgcttgtcagcaacactgatcggggtgagtacggtgactcgtgcgatgtagacacggaagcatctgtccccgatggataaatactttggcagctcgagcgttgagtgcgttttgtccgacattttctgggctgcaataaagggggatatcgtgagagtgaagcaccttgttgaaatcgagggcgagagcccaacagacagcaatctggacccatggaatgtaagctgtatcatcgcagtttgccttttgctgctacggtctcacccatttgatatcaaactgcatctattggtcgcggcagcttcaccaaactccgctgcattggtgagcttttgctgaaagaaatactggaaaaactgagctaactagtgattgtcatgtgagagaacacagggcagcaaaaggcggctcggtgccagtcgtaaactatttgctgactgcaggagctagcccgagatgcttggacgagaacggtagcttacctttgtaagcagcaaacgcctcgcattttacgtcgttgttggccacgagtgacattatacactcatgtttctcattccagacatctctcgtgttgggctggccacgtcgacgctagtatacttctactgcgagcatcggacgtcaaagatctttacgtacaggactacgacgtacgtattcgttgtgcttccgggtgctaccgggcttggtatttgagcagttgtttgctcctggtgtactgtacaggctgcaatgtgcccacttgactgggccaacgtccggggccatacgaagctgatcaaggcaatcgaaaaggtaagcataacgtggacgagtctattcccaaactaagaattaacaaacattttattactctgctgtgatgatctcagtaccaagactctttgtggttgccaaagtttgtggaggaccttatccgcggcatcgtgcgctacaaaatcaaaatcttcaaggagccgccgagaaagcttgcaaagccaacggcaaaagaagctgccactaatgacgaggcaaagactgatcctgctacttcagctcaaccagctgcggcggacaccagcaaatctaccgacaaaccagctgaaagtcaagcgaaagatactccggccaacgattccccagctaaaaaatcgttgttcaaacgtgcaaagagcgaaaaggcagatggaaagctcgccaaggaagacaaaccagcgtccgcaaaatctttggtttagcataaacccatgcggcattaactcatgttatcgtatgttcatgttagcggtataccttcaaagcagttcggtctcgctcacagacgagtttgccaaacgatagaataaagattgaggattctgcgccagctcttgcgggtcaccggtttcagcgaggcggccattatcgagcagcagaactcggtcgcagtgcatgatcgtttgaatgcgatgagccacggtcagaactgtggacgacgcgaactcggatgcaatcgcctgtgcatagtaaacgatcagaatcaaaaacaaatatctcagcagagttataccgggggaactgacttacctctgaaatggcacgctcggtctcgtggtcgattgaggctgtagcttcatcgatgcaaagaaccttcgacgggcgcagcagcgctcgagcaatgcaaagtagttgggcttggccctggctaaatgtcgccgcttgctcctcggcgccgccttcgacgactgtatccagaccgcgatccaacttggcgatggcatttgcgagaccgccgcatttacgtagcaccgtccaaaggcgctcgtcgtccagcgccccactaggatcgagatttgaacgcactgtaccagagaacaacaccacgtcctgtgggatatacgtgagtcgtgaccgcagatcttggagcttcaacgagtccagaggcacgttgtcgatcatgatgctaccgcttcgctcccatgccacagctcggaacagcgcgttcaacagcgtcgacttcccagctcctgtccgaccgcaaatgccgatcttctggccagcagggatctcgcacgtgacgtatttcagcgctggagtcgccacccgtggtccgacccactcccattcggcgtcaccaaaaatgtcatgcttctcggcactttgagctgctgcgccgtacgtcaccgttaaggcctttatcgatatgtgtccagctgtcggccaaacgtacggcatctcttttgcctttgcggtgtctcccgtgcctacgacttcctcctcaggctccaagtctgcgtactctttgacgcgctcgacagcgatcatctgacgctcagtgtcgacgaagctgttgaggatcgagttgagcttccccacaattggcagcgcgtacgtgagggtgagtccaaggatgccggggttcacagttcctgtgagattgaagtcggccacggcgaacacggcaacgaacgaggtgacgcatacgcccagcatgtccaagcgcagcccaaaccaagcgccagtggtggagctgaggaacgagactcgctgactgcgattcaagcacacgccatagccatgggcatattgtcgctgcttgcgcgccgctcgaatcacggtgaggccgtctaaagtgtcggtgaacatggccagcagtggtgactgcgtcgctgcgtccagtcgcttgaggtggcgcgagctggggcgataatctcgctgcaagtggaagtagagcacactcaacgggacaagcagcaccagcaccaagcggttcccgtagaagaggatcacaagagcccccgtcacgtccgccgcgtccttcaggaagatgttgagtaggaacggcagcgattcatcaacggcgtaggtgtctccactcaatcgattcagcacacgtcccgtgggagtacgctcgaagaaccgaagaggagctgcgaacacgctgcgtaccagtttgttgtacgtggcgcgggctgcacgcagacctccatacgcgaacagaaatgaccggaaaaatacggcagcgatgttcgctcccgcgatgtacagcaggaccatcgcaaactctcgcgggctaatcgagtgcttcccgttcgtatacacagcgatccaccagtcgagagagttgcgtgagacctgcatggccgctacagatagcagaatcacgaccgagagaccccagcctacggacaatgaataggatttccagacgtgccagtccaccaccccagactctcgatgctcctcttcgtactcctttggggcctcttccttctggcttgtcaacttcgactccgcttcatcttccgcttgttcgtacttctctgtttcctgctcggattttggcgtggaatcgccatcggaaatgtcctccgcgtggtcaccacgaagagagctcttcatcagcgtcatcagacgacttggagggtctggtgcctttaaactgttgtaagttccttgctcaatgatgtttccttcgtccatgacgacgatttgcgcgtccgtagggaaaagaggcagaagatgcagcgagtgtgtcacgataactacagcagcatctgcagggaatatactggagcccgacatgaagcagttcgtgaccactttgctcgctgtggtcatatccaacccactgagtggatcatccaacaaataaaggtttgctcgctggtagagagctcgtgcgaggttgattcgggcacgctgacccccactgaagttactcccgctctcggagacgttatacggaggcctcattctgcggagatccacgttaagctcgcacgctcgaagaacgcgctcgtatcgagcgtcatcgacgccgtcgtctttaccgccaacgtcttcatgctcattattggacaaagttacgtttgctcggacacttccacggaaaagccatggactctggggggcatacgagcaacgcgaggcgttttggttcttgtaaacagtagcaggatcgctgtacgggctcgaccgcagaggcatttcgcccaacaatgcaagtaacagggacgacttcccagcgccgacagggccacacaccacgtacgtcgacccgggtttcaagtccagctcgttgatccgcagcacgaagggattagccatccttgagggtgatagcggggtatcccctaccaggagaggggtctcggcgcttgatccatcatcttcgtcgccgctgtcggcctttatcaagctccacccgaactcgcaatcgcgaattgatacaatttggtttctctctgctgctgactctgtagaggcagaaggaggctcgtagttgttcgtgatctgagctacgttctcgtcttctctgtcgaagaggaagccgcgaatacgaagcgctgacacacgcgcctcaaggaacccgttgatgatccacgggaaatagttcatcgggaagatcaggcgatccaagagagcgattgccgtgaaggcgtctgcagccgagatgtcacgccccgagaagaccgcagtggcgaagactgagacctgcacgatcaccggtgtagacgcccaaaagaacacgcagaaggcgtccaggtacttgcgcacctgcagcctccccatttcaagcgaacggctcttgctcatggcctccagccttgacacaacccaccccagcaacttcagcgtgcggatcgccttcaagctctctgctgcgagaccaacacgctcgtctcggaagcgcatcatgtccgcagtgattcgctggatcttgcgccccagcacagtctgcagcggcagcatgaccgccaggacggcgatccccgccacgaaggcgaccgagaccgcctggctcagcagaatgagcgccaccgcgatctccgcagggatcagcaccatgtcgaacaacgtgttgggcatgccaacgatgcgcccgacgtcaacggacagcaggttcgtgatgcgtcccagtcctccagctcgtctcttcccctgccctgatagctgcagcgtgcgcgcgtaaatcgcagacactaagccggcgcgcacgcgcaagtcgaacctcttccacgccaggttgtactgcgttcctgagactgctgagaggacggacctccccaccatcgccgcagcgaggtagtagcctgtcgagagcgacgggtccgacgacccagcccagtccaagaagagcttgagtagcaacggactcgcgagccctatggctttgttggccgtcgaccacacggcgaagaccatcacatcggcgccgtacaagcgccgcgagacgcgcaagaaggacctctctgagggacggtactcattgaattcacgctgtagctcagtctcgaacagcttcgcagcgactgccgtgtcgtctcgaactgggaggttcggtacgtcttccatctccagtctgtgcttcttgcccaacgcaatgaacggcgagatccaatggtacgagaactgcgagagccacccgacgcggtccagtggactctccatcaccacgtgcatcttcttgtccttcagcacctcgtacatccctccgtcttcttcatctttcacttgatacaccagcacccgaagcagtgcgaatgcggccacagaggccgcagttagagccttccaacccacgagcgtcagcaccaagggatcagactcaagtctctccatgttcatcgcgagctcctccacgcccacgatcaccacgaacagcacgacgagcttgcagctcctcttatgttgcaggaactcgtacaaaacccccgcggcgtagaagacccaggccgccgccgcgacgctcgctccaattaccaacgacgccgacgagtgatggagagcggcgacacccgccacagccaccgagcaggccgcggcgccaataaccagcagcaaatgcagcacgaacagcacggcgtcgagctccgaccagcaacgtaaggagcgcgtccgtcttcctgcgagctgcagcacccgcctcatgctcagcagcagaagaatcagctgagaccctgcacattgatacattgatacattgacacctatacgtttagactcttccattattgcctagtgttacggatagtgtgcgtataccttgcagagcgacgagctgcgtgcattgcgcagtcgacagggccgagccgttgagccgcacgcagtaggcgggcagcagccgcataagcttagcgaagatacgccgcgaggggtccaaatccgacctgatgtaccggcacatctggtacatggcgatcccaacgatggtggtcattctgcggttgggctctcgtggtgctgcctgccactgtcaggacacgtcctgccccagccaggttttcctcgattccgtacaccactccgtcgttggcttgcaagaacggaaaatcggcagtcttgtccatctttcagcccaacccatccgtgtcaaatgctaacaagatgcacttcaccgagcgaatcgaaaaactaaccgcccattcctgaacttgcctagttgacagcaggccatggggacggaggtttggtacgacttggtggagcaaagcacgcgccggcgcccgaagcacacggcggcggctatcgcgcagcttgccgaccacgagacgctgttggacgatctccgccgcaagatccatcgagactgcctcctcacagatgtcgtcgccgtgaatcgactgctagtcttcgagactcgagaggcgtacgactcgcacgccgaaccattggacgctgacgcccttgttgaaggacttggcagctcgagagagaaggcggtcgtcgtggagattccggacgcgaagcaaccgggtgcgacgcgagcgcaagaagtcgtgctgtctatggccattgatgagcctcacgctgcagccttccaggcctacgccattgttgctgaacgcctcaagcgatccgagggtgtggcggcgatggaagcaacgctcgagcgcgtggaccagtctggtaatgggcgcttcgtcgtgctggagaactcgtcaggcaccggcaagacgcaaatggcgttcaacctgactgcgagtggagtgtttgacgtcttttacgtcttgtgcacgcttccaggggacatggagcagtctgtgtaccgatcctttcgcagtcggacgatgtccttcctggcgtgtatcaacttcgacgtgggggtcctgcgagagggctctgtggccgagttccaaaccagcatacgcctgcacctgtatgccttcatcgtagcagctctgcgaggtgacgactcgtgccagggcgaagctacgcgtgctgatgtggaggaggttcttcgccagcggcaacagcgcaacgccaagccctttgtcttcttcctggacgagtttcctcgagtcggttcccttctgactggccagcagcgccagcttcgtgagaaggagatccggtcgatgcgcaacgtgttccgctcattcggactgttggtcgtcaccagttcgactaacggcactgcgcgaactcttcagtcggttggtgagcgctcgagagtgacgtcggagtttgggcaaagaactccatggtgtgaggtggtcccttcactcccgactcttgctatccgccacgcagacgagcaaatacccagtgagataatgtggatcttccagcacagtcgtccgttgttcgttgaatcagcttggcactacgtggagaagaacccttacacgggagaaaacgcggtcgatcggcttgagtatctgacccgcatgacggcacacctggccccacggttccgagctttcaaagagaggagacggccacaagagtttgagctcggtcaggcctgtttgctcatcggatccagctacaaagtggtcgacagatgtgtcgacctggtcgatagccacttcgcatgctttgaagagcgggagcccttcgagctcgagctaagtggcgcaggccgattgctgaagaaggggaaggactgggagggccgttgtgagttcccgcagatggagaaggacttgctgctttatctgacgctgacggggggggaccacgtgcagcttccctctcggcactggggttgcgaagccgtactgcgtccgacgaagaccccactgtatcggattctacagcatccgttcttggacgatccgaaaaatatctgcagaccttcgcaagcgagtacatgtacgcgcctcagtgctcaagtgagtgctgctattggcgttgcaagccacgtcggcggcttttatggggtgaagttgccggctttcttgggcagactgttgtatgagctgggcgtggctgaacgggctgacacgatcgtagacttccctccacgccggactacgaatggtgtcgagatggaccacagtgtgaacgcagtgacagttccgttcctgtctacgccgcatacgcgttggccggaagcgtttttggagacctggaaggatagtcctgctcaattcgccaacttactgtgcacaccacggtcgaagctactggattttgaggccaagtcgactgctgagaatgaccaaaggatcctttcgggcgtcgtattcgatcgttgcggtgcggtttcgctgaaggatcttgaaggtgttctcgctggtgctccaaactcgacaattcaccttgtggttgtgaagacgctgcagaagacttacttcaccagaagatcttctccggcggacgtggcggcaaatgccgatggagaaccgggcatcgctgccttgcatggattgacactcgagtctgctttctcagggactcctgctgggcttctggagaatacgaagctgcaatgcgccgagttttaccgcgtaacaaaagaatctgagctgcaaccatttcaggagctgatggaagcgagatcttctgtgagcagcatctctcatcatgacactcgaaaggaaaacggggcaggcagggtggttctcttcgtcgaggtcggggactggggtcaagcgaagaaaaggaagctgccagctaactacgagttaggagagaagcttagtaagataaggtcctactactaggctgagctcgctccaacgttctgtcacatctacaggaaaagcaggaatcgatgcacaactgaccgcttcaggaaatcaccgtcgacttcttttccaagtcgtccttcactttcatgtcgatgggtcacatccgttattgctcactttctacctccatacaccaccgccggtctgcagttcaagcaagtgcagcttccatcagctttttaaactgtgctaacacaccgtctttcgaaacccggttgaacgattcagtagcaggctcggcgctgctagcgttttcagttcaggacaagtcacgcgcaggtatttcaattggagatactaggagctagttcaaaacccactgcgcggtaaacgtatttattatggcgctcggtggtattgcacctcgctagcctcgagtggttcgctttcgaggtacggcttggctgccgtgctggtactcggtccatgctcagagtgatcactggcggcgtcggctgcactgatgttgtggtggtggttgaggtgcgataacctcagcagcggcgtgagtagagcgcagctgaagatgaagatcgacatgtagaacagccccgtgctgtacgaccccgtgacgcggaagatgacgccgaagagcgctccgcccatgttgcctcctgcgccgactaggccgttgactgtgcctgtatggtgctcgttcagatacgggacgatgccgtaggtcgagccacccgtcgcctgcgccgcgatagctacgagcacgtagaacgcgatacatagcccgagtgagtgcgatcggctgagcgccatcacgaaagccccgagcacgcacagcagcgcgaactgcacgtactgccggccgcgcatacccagtcggcggttgacagcgtcagacgtcaaacctcccaccgcgcgtgcgaacaagttcatcagtccgaaagaagacgccaccgtagccgcgctcgtcttggacagtagtgagcagaacatgctgtcggtgcagcccttcttggtgaaccccttgtagaagtagagggcgcccatgttgttcaactgcagctcggtaccgaagcacgccgcgtagtgcgcgatcataacgagcacgttccggtccgacaacacaatcttgaacgactgcaacaagctcggaggctgcttgtcatctccatttgggttttcggcctgccgcttcttgctcatgagctcttggaagttcccggtggggcagctgtccactgcgaagcggatcaccacacccatagtgatcatcagcaccgccggcagcgcgatggtgatgcgccagcccaggtcgtccgagacgtgtccgcttgacgtgatggcctggaacacgaacggcagcagcaggaacgcgaagccgatgcccgagagccccaggccgcccgtgatggcgttggccgcgcccgccacgttgcgcgcgaacgtgatggtcgtccagtactgactcgtgacgaagacgcagcccacgaggccgacgaagaacctcacggccagaagcgtcgtggccgagttgacgaacgcagcgcagaagatcgggatggctccgagccacagcacggcgctctgcactgcctgaggaccgtagcggtccagcagcgggcccgacgcaatgcgcgagaagacggtgctcgctgtgctggcgatgtccgagttgagcacttgaccgtcggtcagtccgagctccgtcctgatcaccggcatgagcggcgggatggcgtaccagccgaagaagcccgtgatggccgacatccacgacaggtagaagatgcgcatgtgcggtcgcagcatgctgctgggcttgatgctcgtggctcggtcgaactgcttggggtcgactggtaggtcatagtgctgctcactcgtgtcctcttgcagtctgttcacctggacgaacacgcagcgaggagactcgccgggcgagggcaaccgggacgagagctcccgtactcgaggcgtcaattggacagagctcagcgacagcttccgcgctggcgtggagtttaacggctccattgctgctgctactggctggctggcgcgttggattgctcgaggacgctgcaaattgctgagtgaggctcgaaagcaaaagcttttttcgtcgaaaggaaagggcgagtcgacccagagcccaattaccagagccaatgccgccagcaatttcggatgactcagacaaaatcgctagcggtgcgtcgcgtaccgttcagctcgtgcaccagaatggcacttcacttcaatgtaggtcggtagacgtaccgccacgcgcgtaatctgtaccatcatcagaaagctcgtgatttatgtatgcgcacactaagatacttttcttggacatggagcagcgctgggggttcatgatcccttctgatcgacatcaatctgcacggagttcatggggatatgtgggcaaatactggccgtgtgccgaatctccaggtgcaggtatctaatcaggaatgcggacgtgcccggttggtcctgatggaggcgctcaagttaatggcagcggtggctcacgtggacaacagcgcgtgcgcgtacttgctcatgaagcactgcggtgcattcgtgggtcgagatccggaccgtgcgtttgaagagcatgtatcggcgcggttcctgctagaattgtttctggaagggaggaataacgagcgcacggcgacgtacgaggatgtgctggtgcggttcctcggcgtcgatcaaatcaggaatcccagtgataagtatgttaagacattagcgagaattgcggctttggactcgaactcacgcccggacaagccaggggtggacctcaagatcccaatccgagtgtacttccgcgtgtacgggcgtgggtcgtccggcggtgtgatggaagagctcgcggatatcagaaatgctgaaaagcggatcaagagggagtgggaagcgtttgaaagggactctgaggccatcgttgtaccatctggagccatgcggtgcaggtttgtgctggagcccatgattgcaagctacgagaaatacaagattagctccgagttggcacaggcgctggatagtatggtggctcgtaatgtctggttctcgcaaataatgctgtcgatgactgtcaaaccggaattattggccaattcgcgcgctttgaagaagatttaggccagctaatgtctcgactatttgacagcgctcgccgtagccccgctctggcaaacaccagctacctttcggcctttagcttgattcaggagcagaagtctcagctggaaacagtccggctatgctggaaagaatcaccgcgtacgcaacactttgaggggatgtgttctgctctggtacgaaatcagacaaagaagaaacttcagctgagtttcaaaatggactggatggacgccttgctggcacgtcatgaccctgttatctttgtcagcacgcaaatgtaaaagtggctggctcacgcgctattttcaaagagagcgcgggcttgttcttcattggaatcgttttcactgcgttcaatcggagggctttctgttgagaacgtggacgaaatgctggcaataattgagtccgaccatcctgaagaacttctctgtggccttcctcgtggagtgaaggaggaaagagatgcgatgttgaccagtggggctccggtccgctggcaatttgatgagaatggtcaacccgtgacgagctcacgcccgctaacatttccatcaccgatatcaaaaaaaaaatttgtcttggattttagcgacgatggagagagtagatgggtggacgtgatggtgcctggattggggagatgccaagttcagcgggatgacttggtattttatgaagcccaggcgcgtgaggtacggccacgctgccttagatcgggctttcagggatctaaaccgtcgggtgtggccggtctactccgacttctagcagcagtagaggcgtcactgcggtatttggaggtcggcggggtgaactcagaggtgaatatcgctaaaaattttgaatgctgcccaaaactggatgaacttgcgctgtcgggcgatacgatgagcgcgcagtttatcttctcagaactggggcagcggtgtgacctcaactccggtctaaaggttgattggggtgatgttgtagcactctccggcttactaagcgatgcgagcggaccagtggccaaaagccttcgtaaactgcatctcaacttcttcgatggtgattatagcgcccggggtggccgtcatttttcccgtcttgacagcgagttgcaggccctagcaagagtgctgaacgcgaacagcaatttggagcgactcgaagtcggtctcacagcttaacaccaacgtttcgccgccgattttgagaagtatcaccttgagctgatcaatcgcggaatgaagttatcgacggggaccaaatcagcgtttctaagcgtcatttcatttcaccggacgtcttcagtgaagatcaagaagacgaaacttcaggtgggacgcaacgggtctgctatcggtgagctggaccagcttgtactgcttaacattttcgcatttgcggcaccgcctgtgcttcgacacgtttactttcgagtgattccttatcgtgacgacgatagcgttattgtggatcgtgaataaggaatagaaggatacttcaacttcgtttgcagtgctttccttctactgtttggatgactccaaggataatgcattcgatgaccacttgtctttctataggcttcgtagtcgggagataaattatcacactatttactagatttaattacttgatctcagccacggccattctgctcgctgaatcagcggtagaaggcgtgcatagttctccagcaaggttggatctgcttatcattgtgtcacgcactcctagcggtattcattctttcactccacgtcagacagacattcacatgaacgttgatccctcggcttttaacagccagagcccccagtcatccgtaggcaagacgtactcttgaatagtgacatcacgttcacggtggatatgtagataaggacgctgaatagcacgatgatcacgaaccacccgcctgaagtgctgtagcctccgtagtaacgcagctgctgcacctcgagcttctgacggggaaggaggccaatgaaagcgagactgaagagctggaaagcccacacgataaggtacgtgtaggtgacctgcatgcgcgtggactcggagtcgttgtggacggcctcgtcggagacggagaagtgcgagtcaatagctttgtacaccgtcgtccccagagaaatagccatgttacggaacgtgatgaccagaccataagtggtggcttcgatcccacgcggggccagttcaacaatcgggaacaccaagaccatgaaacgtagagccattgccggtgctgccaacactggcatatacagccagaaaccccgcctcctcaccacatgaaacactgtgcacgccaccgtgatcacctctacacccaccgcccaaaaggttgcaatgcagaacaggtgtccccaagctccgcgcaccaggaagcgccgagtcgcgagcaacccgcccacaaacgccacataccacacagctgaggcaacagtcttcggccacacctcgacatcgacccagttagcttcaatcgccggggctgcgctcgagtcaatcgtcacgcagaaactcgcaatgaattcaaatatcaagaactgccacatggcgcggctctggagaagtctccaaatgatctggcagcgcgcggcaaagcccagcgaagggtcaagacgtgccgtatctggatgctgtcttccaggtcctacagggcacgagacgacgccagtgaaggagaaaaccggcactgtctgcgccgccgggtcttcgtgcaggagccaaatggagcccacaagtgacaccgccgcacacacagcctgcaccaacaggacctggctcaagctcagcgaccacgagaacgttcctccatacgctggtccatgtagcgttgcaccgacgaataaatccatgacgatgaacccaatcgtcctcgcaacgtagatcgacacctgcgtgtgtccgcgcgagggcaacggctctcgctgcgcgatctccaccacaattccatccgccgccacgttcgccaagaagaagccgatcgtccccagcgtcaagaacagcacatatctccacgccgcgtccgtattccccgctgcgggcattcgactcactccgaggtacagcagactcaccaggcacaacgaccacccaccaatcaagtacggcttcctcctgtagccgcatatcctcaagctgtccgtcaacagtccgccaaaagccttgaagttccacgccgcgttgatcatagtcgacgccccgcgcacctggtactgctccagctccaggtagtggctcaggaagggcacgacgacgctgttgaggccgccgtagagcgcgccgatgctcgcgtagttgaacagcagccccactgtgcgtctggagagcagcggcacctgaccgccggggcgcagcgcgccgtccggctcgaggccgtagaagccgtactcgcggcgctcgcccagcacgaaggggtcgggcggcagcgcggcgtgcagcagcacgagcgggtcgccgcgcagctccgcgggcagcgagtccaggctcagcgacagctcctcgggcgagagcgacatggacttggacgagctcttgagccacacgcccgaggacttggcgtcgctcgtgagtgaagccatttggtggcggtgacagacaagtgtgaaacggcgagagtaacggttggcagcgactaacgcagcgagttcgtcatccacttgccggcaggggaaggcaggcgcgttggctggtgtcaattggaggcgacgtcggtagaggacgctgcgctgcctgcaaggagaggtaataactgaagtaaccgggactggcggcgacggactcgtgacgcgaatgcggggtgtcgttcactcgagtcgccagtcaaagtggcgacaaaatggtgcacagaaccgcgcggagaatccgttatgagagggacttgtgggaatggatgtgtgataacaacttgtaggtatgaaatagaaaaggttattgcatagtaagcatactaaaacccaacattgttccatggtactcaagtgacagggaaccgtgtggtatcgtgtgctagagtttaaggtgggttgggatggtgcagcatgtactttcgtagccaaacgtcatcgaggaagtcgccggccatggctacggcctcggcagcaagtccgatgttgttgctgtctggtaagttatccacaactgccaccaagcataggctcgcagtttccttcctgttggctgggcgagagaactcttcagactcgcagcagtctgcgtgctcggatccctcggtatcgcctacacatctgttttagcggaaggcatgccctgggcatcagcaatgatggcgcgggtccgagacatatccacctgcgtcgtagcggtttggctccttcgacggttaaaggagaagatttcgccagtggcgttcgacgtacaagtatccagatctgtaaaccattctccatgctttgcgtggtcagtcgctcccagcaactatttcatgaacaggcagttccttcatgccttcacagcggtgccgatccagaccttcaacgactctcgttcttgtaatgtcactcacaacaatggttgaagacaaagcttcgccagcccgtcaaccaaagcaagttacttcaacgttttggtggtcgcatctgtcccaaaaagactaaggttcaggtgccgaacgtctcacaaagacttttccctccatgccgccgtcgcgccacgcccggaagcgcccgctgtggttcgtgtgggacccggcgggcatcgtcatcgcggccttcgcgtgggtgctgctcttcgcgctgctgggggccgtgctcacgtccatctcgcagtgggtggggctgctgtcgctcatgggggcgaccgagggcctctggttcacggggctcttcgccatgtgcctctggtgccacgtcgtggtggccaccagcaacccgggcacggtgccgttcaagctcaaggggatggcgccgcctggagctagcagcgacgaggaggaggaattggaggaaggcgaagacgtggaggaggtggaggaggagatgcttctcaacgagtacgaggagacggaggacgacggctcgctgctcatctactgcgacgagtgcgagatctaccgaccgacaaggtgcaggcaacaatggcgaaggctatgaagctgggtgttttgtggactgatggtgatgtgatgtacagggcaatgcactgtcacacgtgcgagcggtgcatcgtactgcaagaccatcattggtacggatgtgcttgggtgtgttttatagttatcgcgccgtggctgacggtgcatttgtctgttgcagcccgtgggtgaacaactgcgtgggcatcggcaaccagaaggcgttcctgctgatgctgctgtacgtgacggccacgagtgtgcaggcggcgctgctggtgctgatgcagtacatcatgtgctcgcggggcaagtactcgtgcggcctgcagaacgaccagttcccgggcaagttgggcggctggatccttgcggccgcggccgtgttcgggctcttttgctcgctcatgctggccatggagctgtacaatatatatcaggacccactgttcacgatgatcgccaaccagctctcggcccgccgcggcggcgacaagtcgcagtcaacactggagcggcatctgagtgtcatctgcgggacagacggcatgcgggcgtcgtggttctttcctccgcccgagcggcgcgcgctgcacgacatggagattgtgcagggcttccggtgtcgccccgaggatgcggacgtctgctagcaccggggaggatgtgtgcatgactacttcctttaacgccactttcgttggcattactacatgtagctgcagtacaaatgtaggtctccacaactcgcccacacggagtcagaagccacttataccagcttgctggtttaccagcctcacaaattttaattcgtcacgaaatgtattcacagtgcaggtaacgtccaggagtcggagcgtgtgcaaagagcagcgaaaaactttgctcatcagaagttttaaggtagtaaacaggcttttgagagtttccgttcgggtatgtagttctaatagtactaccgaaataatagtttgtatgggataactccaaacttttacctagagatgttgctaacagcgataaattatcgccgataattgaactggaaagcggacgcatcctaaaggagcagtaacattgcctgcttcaggagattggtactgtactagtgataattttcatggtactacatggacattcacgaaacaaaaaatgtattgtgctgattgcagtagacagtgtatcgtcacgacttccttatttcgctttaaacgccgccgggttacgtgctttggcccgtgtggctagctcgaaaaacctttcgtagttaccgatctctccccgctattcccccacggacatctcctgcatctgcttgccttcgactgcaagaattgtgaggggcttcccaaaagctgcaggtgtgtggcttaagtcccaacgcggccactaaagaatatgcaacggattttatacaaagtctattagaagtacgcacgtctactttacttagatatttgtatttgttgcggtttagtcggctacctactcccggagacgcgcactgctgtatctccgcctacggtggtcgtattgctagatctctaggatatgagcccgcgataggcgcccaaccacttcacttagatagttttaggttgtggcgcatctgcatcacagagggctgcatctgaacatttttgttttaagtaaccatgcaaaacttgcacttccaggacaaaagtacaagtagaaaatgatctccgagccaaagcccagcaaccttgttaattttaaattacacctttgcctggccaaatacacttttgcccagcaagttggcctgaaattcaactaaagctgtcaagttcattttgggttgttgaagatgctaatgattttcccaaactaacaagtgccactataggaaatgaaatgaaatgagatacattttcgcgtagccgaagttatacctgcgctagactcaattttgctagtcggcggcatagagtggtgtccgcatatgtcgggtctcccgctgcaggcagcgagtcgaggattgatgtcatgagtgtcttccatcttgtattgtccagtgctagttgtccaagttcgtcaagatcgcgcgcgcagcgcagtcggtatccggagccacttgaaacgaggtctgcgtccagtactagaggcaacgttgtgcgcggtcggccgcgccacttagctgcatcgctcggagcaaagtaggccgccatttgaacgtacgccgggatctcagggcgccgcaggatgtggccaaagaggccacacctggacgccgtgatccggtgtcggagcggccgctcgttgcagatctcgtagaggccttgattggagacgtggcgagggtagcgggtgttgagtacgttgcgtagctgccgacggtgaaagctctccaggctgtggagctctgactgcgtcagagcacaggtcccgctgttgtagagtagaaccggcaacacgtagcagttgtagaggcgaatcctggtcttgtccgtcgtgacgtgcagtcgcagccacaccgcccagagccgattgagggccgctgttgccagtgacttttcgtctgttgatatcttcggcatcgccgagtagtgatccgagcattttagttgatcgccatgtctccttcgcggctcgggtgtgtctggtttcgcctgctggtcggacgtgccgttgaatccttgtaagctcggtcttggaaacattcatctggagcgaccatcgcgcgaggatcgccggtgcgcgctcgaggatgaggtcgaccactgccgagtcgcggcagatgaagtctgcgtcgtctgcgtaaaccaccatttgctccaggagctggaatgggacatctagttctctagctacatctctaagagctgcctctaagtaaactacaaataacattggcgagagtgagtcgccctgaggggtgcccgtattactcttgaatggagcgagcgttttggaccctgctcgaagtgccagcgtggtgttagtcaggagcgtccggataagtcggacgtcatcacgggtcaggaaggtctccagaacctagagaagccgctgccggtcgatagtgtcgaatgccctggagaggtcgacgccgaggacgtgaatattttcttggtagcgttgggcccgggcacaaagccatcgatgtgtccataccgcgtcagcggtgttgcgtatttttctgaagccgctctggttgggcgacagaaagcggtctactgctggggagatccgccggagtgcaactagcgagacagctttcctgatgctgtttaggatgacgattgggcggagacttgagcatgccccgcgcggtttgttcggcttagggaggcacagcagcgtgcttgccccgggtcgagaggttctccacgttcaaaacttttgttcagcagagtagcaaggcgcggagccagctcatcagctccatatttgaggagctcggctgggatgtcgtcggggccagacgctcggcggttatttagttgacgtagcgcttggcggacctcgtcggccgtgatggggcagtcgagtacgcgggtttcatggtcaggagcgatgggtgatcgcgtaggtatggccaactgggtctgaaagtgtgagcaaacacgggtgttagtcgtagcctggcgaagtatatacttacctgtagagtcgcgcagcattagcggatcggcttgtctcggtttgatcgcgcgcacagcttcgtaaaactgagctgtgtcgctgaggctttcgatctggcagaatttttcgtcgagttcctggttagcgaggtcacgacaccgatacttgatctgatgtaagattgcgttgcgttctcggtggagagcgcttgtgcttgtgctgcgatcattgtagatgcgtagctggagagctcgttggcgggccgagagctctcggagaacggcatcgtcgtatctgtggtgtcgttggcgccgggagctgaagtagactgtcgtttcggctgtctgcttgactaggtcgagggtcgttttccactgcatgggggtggagagtgtgtcggcgtccttgttgttggcaagggcgtgctgcagcgcaatgctgtacttggctcgggtctcttcgtcgtggatgagctggtcacgtgcgagtcggagggggcgttcggtgcgctgatggggcttgaatcgtaatctctgagagtgttgaagcacgaagtccgccgtaacgagtttatggtcggacggagtgttggttccaccccaggattgagcgtccatgcaaaagcgcctgcagttctgtggacagaggatataatcgatctgattgtagatgcagacatcggtcctgtgttggatccaagtggtcttgtgcttcgcgcgtttttggaatgctgtgttagtggcaaagagacgaaacgagtcacaaaagttagctagagcatggccgttgcggttgcgcacttctcgtgcgtgtggccccaggaaggattcgccgctttgtgcagtatcagttggaggacgccgatgcggtcacagtgagcccagtagcgccacaggtatggtcgcaggcgtgctgagacggcaaagccgacgccgtggttttcctgtgtagcgggtagagttagtagagtgtagtcaccgatgaacttccgaccgagtgtgggtatcttggtctcttggaggccaaggacgtcgactttgtagcgctggagatctcgtggtagtgtgtcatattgcctgcggtgcgagttgagcgactggacattaaacgtgcctacacggaggcggttagtctggttaggacgagatggaggagggggtttgacagcggggactgctggtgagcggaggctgatacccgcaaaggacttgcagatgcccgagagcacctgccggaagcccgagaccagcatcatgctggccacgcgttccgggggaggacgtcaccccaacccctccaaaaagccactataggagttgcaacaaaagctgccttagagcgaatttgtgtttctgaaaataattgtccctccagctctcgactcgatggactgctgcgcgttgctgctgttgtggggtttgtactgcttgcagccagggtatgtgtcatatataatgagtattcaatattcagtgagatttgaaatgatatatgacgtatctaactgattggcattctacctgatataatattgatgcttaaaattatcaatattaactatactgtaaaacctctaattgtgcccctgggatcctaacttttagacggggatatttaatcagacactgctctttttgctagcaccccaccctcaaataatgccccgccgcccttgcatgattgtagatttaaaccagaagctagggaatcaatctaaaaccaattcaaaaatcagcttttatccttggtttaacgttacacgcaaaccgctaaatttagttaaagttacatgcaatacagtgtccaggaaatgaaggtaactatctctaagtgaatacatctcacctttgcagcccaaaaataaacacgacggtaactacataacccttcttatgttaggccgacaacaagaaacttcacactgccaataaaggttcatattcgaatggagggggggtactaagattgggaggggttctatatttttttagtagagagtggggtactattagagggtgcggctcatttagaggttttgcagtatactcgaaaaatgtcattggtaccaagttaacattaccccctgccctcggcagctacaccgcctgcaaaactattaataaaagggccgggccaaaacaagggggcaacaggcagctcaaaacagggatctggcagctcgagggggtgggggtgctggggtgactcccaccccccaccctagttggatggcggtccgcccctggctgtctccttctcgttcaacttggctgggtctgtcgcccggggactgctggagggtcccattgagctggtgcttactaagcaccaaagactaagcactgcttagtctttgatcaacgtcgccgagaaaaaatctcggcagccttcagcctcacgttcctgttgatcattgccgttgcgtcgacttccagcgtttttgagctcatggcggggagcactacgagtaatgcaggcacggcttctcgggtactcgactagtagtaggctacattaagcagggcagataccaccagcagccaattgctgctgcgcgactgaagcacgttgaagcgctcggctgacggcaaagcggcgctcggaatccaggcgccgaagatcgggccgcgagtcgtggcacgtaatcggcgtaaacgcccgcgggaacgcggtcaagccatttgcctgtctcggatcaagccatcggcctcgggagcgcagccatgttggatgaaggtcggagcagccgcgccgcctgcaaaatggagacttgcaggcaccgatccgctggtcggcgatcctcggtctccgctgctctgcaccgagaaatgggccttcaccggtgacatgagccccgccgaccgtctctgcgcccggcaacgccaagcagcgtgctttgaggcgggcccgggtcggacgagtggccgccggcgcctcgacgcctcgaccaaccgtcgttgccagcgcagtctgtgctggcagcaagactgctccgtcgagccagcccgaccagcgtgcggtagaccgcggcacggcgcgcgaatatcgtgtcgggggatgactgcacatggggcgagcaagagcaagagcagtgctccgagccaaacgttgcctttcagttttcctataggccttaaaacgagtttgtcagcgctctatcagactcttagcactacacgattttgctatgatacacttgtcgaagactgaggtcgttccagccgagattagctactcgctattgaaggtgatcttcgttaaatactttagcaagtctgaatagcttagctcggggcgcaggattgatctaatcggtagtttggcgctatatcggaaatttcacaatagacctgctcaatgactcgcaaccacccagcacgctgtgcttgtcggtcaaactggacacttctggccttacttggcgccggtctcgacatcacctacagtggcgccgagtccacttgtgtacctggttaactaacaaacgacatgcctgcatacagtggagctcgagcgccccgcgaagaagcagtcgacagttacctggttaatttagctcaatgaagcccagcctgcacggcgtgcgtctgctgctagcctgccgcgagcttcgatgcgaagaagcgtgaccgcaagcgttgcggtcctcatccgtagcatgttccgcatccgtcgcgacatcgaaggagcaggtgcagggggatgataatgacgcgacagtgtttagcatcttaaacaagtgagcctaagtagtctgcccgaagagattaagcgactttgtgtgtgccatgcactcgattagaaccgagtaaaatactgagtgacttcggaaatatcaaatctccgttgctttgttgctttccccaccatttcactttgcaacgaaccaaatcactgagtaggcacaaatacagcaacgaatttcgcaatagatcacctactcggtttgagttcttatgtacactggacgtcgcatttgctctggcgcaatcgcacgtaatcggagggacagagccgggtcataaagacccattttcataagtgagtcaataattgggctccaaagagtttcgagctgctttgggcgtacaccttgctattgcaggcagggttcgatactagtagatagcgggcgcacacgctgaagaggaagctgtttcgcatcggggcttgacccagtcattatcgctcctcaccgacaaggcactgcgagagagggaaatagagcgagatacctctgcgagataagaagacagcatgattgtgtgtttgtagaatccaatgctcgttgatcccggagagcatcgctcataattgtagtgtattgcgcgaatgcgcagtagctgcggtgaccgcaccagtaagtagctcggtcagttctcatttcctcctctgctgtccgcgcgtcatgtgcaaacgttactctgtttctgcccttcgaatgaactagcaaattgtatttgccaaattcactacagtagatacgcccatacaatatcctacacttcgagtccggcaatgcgatacaactgtaacttaaatacagcggtaagattatattagcagcgggatgctcctgatgtgactgacgatttcgcgttgtcttcgctgtacatggtaaggcttacgaaacacgggatatgataccggtaacagggccccacggcagtatatctcttggtaccacggcactactagtcattacctggtgtgaataagctgacaaggtggtcaaggtatatgccttcccgatttggcccagaatcctgcctcgatagccagtcgtctgcaacaacgcaggttttgcacgttccagactggctggcatgcagttgataacaggacaccgtcactaaacacttcgggtggtgggctacaatggagacacccagttctgccgcgatcgatttctcgttgtgaagttgcgcgactttttagttaagatttacagcacccctggcagtcagtcggtggtttcgctcccgacaacgcctccactgaccagcgtacagccaagagagacgtgcatgtcggagtgtatatacacttgctacccgataccagtctgtcttgatacccgaggaggttactttcgggttgttgtgatcgttttggcttccgaggaaatctcgagcctttcgacggaatagttcgactttgagtcggcagattaacgttgcaccgctacattcccctgcaatccgactgctcaaaacgcgctgacagcacgctgctcaagctatccaagctgttagatagtcgactagtgcccgtcgaagaggccagcgtgaatttgctgttagtagcgctcggcggcattccagctcggatctggaaccaaatcatgtccgcctgatagttgaaatatcgtgaccgcgaggacttccacgcagcgagggctaacgcggtcgttgaggtgctattcgcggtgtgtttgcgccggttttcctgcgatcatggcgcgcgtcttgcagttttctgctcgtaattgggcgctctgaatgggccgttccgccccggccttgcattattacagcccattttcgcaatacctgctatactgcatatatctcggtccacgcgacgtaaaccccgagccacttgcagttctaccctcccttcaggaacacgtaccctaccctgatagcgccattgactgcaaccttgtgagcgcaaacactcacttctttccgccggcaacatcgctcattcgcacatttaccagcaagagaccacaactgcacacccgtagactcacccccatggcagtgctcccgacgcgcgccagggacgacgagcccgagcacgtcgggcccgtcaagaccatcgaggacgagaaccaactgttcgagacccagcccaccaccgacgaggacgacgaggacgagctcgccgtgcgcgccaagcgcctgtccagcgggacggcggccagcagcgacggcgaggccctcacgggcgacgacaaggagcgcatccgcgagctgcgcgagcgcgtgctgcaggacgccaaccgcgcgtcgtcgccgtcccccgcggctgcagcggcggccaacaagaaccacttccgacgcgccacgaccgtcgccgtaccgacgacggggctcgtgcccaagagagacgcgcccgagaaggacacggacagcggcagcgaggccggcgagacgcccacgagcctgcgcctgacgcgctccaagagctgggccggctgcccgcagcgcgacgccgcgctggaggccatcgagcagcgcctggtgcgcttccgcttctccacggccgcgtccgcgcgcgaagtcgtgcgcgagatgcactcgcaccgcctgcgcgagttccccgagcaggtcctcatgactgcgcccatggagatgcaggtcggcaaggtctggcgccagatgacggtgcaagtggaccgcgacggcgtcaactgccagcgcgtgtcgctcttccgcaagaagaccaaggagatccagatcgccaaggacgacctgctcgccgcggccctcacgcccggcagcaagaccagcgtggaattgcacttcatgctgccgggcaacggcaaggagcaccgccgactcatgcgccgctaccgcacgttgactctgcggttcggtgacgaggagacagctgccaagttggtgacatcgctacaaactttcatcaagtggatggcccgtgtacccgagaatgtgacacgccgcatcaaggtggtggtgaacccgcactccggccgccgtcgtggacgcaaggtctgggagcactggaggccgctgctggagttcgccgacatccagtgcgatgtggaggagacgcagtacagcggccacgcccgcgacattggcgcggcgtttgacctggagatgaagtacgaggccatcgtgttcgtcggcggcgacggcaccgtgaacgagttcatgaacggcgtcttctcccgagaggagagcgtgtggcgcacgctggttgctaccaccccggtctcgctcatttgcgccggcacagataacgccttcggcaagggcgtgggcaccccgactcacgcttcgtcggtgtactgcatcatcaaacgcaagatccgcccgctggacgtgatgacgtgccaagccagcaacgatgacggctcgactcgcctcgagtttgcctgcacaggtgtgagctacggtatcggctcggatatcgctgtggagtcggaggccacgcgatggctcggcgtgcaccgctacctctacctcaagatcaagcgcggcattttcgcgccgcacaagcacgaggccaaggtcagctacatcctgtcggacaacacgccggtggaccccgagacgggcgagcaggtgctgcgcacgtactacgagatcatggacgatactgcgcaggaccagcataacgtggagcgctgcagtatctacgacgactcggacccggacagcaagcagtggaagggcgacgccgagaccattttccaccctgccagcgaggagaagtacgctggccagtggcagagcttcacgtccgagctgacgtcggctggcggctccaacgtgtacttcgagaccaagtacgcgcacccgtcggacggcaacttagacctgatctactcccgtaagggcaacgtcatgcagacggctgagatcgccgtacgctacctgtcgaacacgttcctcaagtcggagcttgtgggctactacaaggtgaaggccatggtgatcgagcctatcgtcgaggacgtgctgaacgtggacggcgaggtgttcgcgggcccgggccccttccgcatcgaggtggtgccgcagcttctgtgcgtgctgtccgaaaagtaagttgcaacctatccataattgacgattcataacacacacacccgaagacgataaaaaatgccgtggtgtagtgccgtcggtaacatagtggcaggacgtaggcgcagagcacgatcgaagggctctaggggcaaggcagcgggcgtcgaaggcagcgcccgccgccgcaggagggtaatctaaagttcatacacgtagtgagtcagagagatttcggagccattgaacaatatgtgaaggcgcacttatgactgaaaaacggctttgagggtaatgcaagggcgaggagaatcccgaaatctctctagtgattgcttattcccgagacctaagctcgcgtccagcagtcttgaagtcggccgtcatcttcccgccaatggcctttacacgtccaacctgccatcagcacccactgccgatcaaattgggcactggcgggcattccgacagcggcaaactgagcacgcccgatgccttcatatagctcaatgttcgtgttcgtcctgctaacactgcggataaggcatcggataagaccacgtagggcaacgaggtgaaaagtatcttccaaggctagcatagcgtgtcaaatgggcatttgaatgccaacgatgtagccatcgtgtcacggatggctacatgtcgataaacctttcaagagtgatatttgtgacctcatacaaaacgcaagtcaagtcgaaaaaagcccgattggtgagaggaagatgtggtttcggtaccgttcatagcacattgaataagccccgccacttgacgaggtaagatcaatgcaggcccctgatcacgactctatacgtactgtacaagctggtattttgcacgggggatgcagtttggaagcgccgccaaactattcgggcgtggttttgctgcgtttttcattgtgatctccgtagaggggcggtcgagcgcggctaaaggcgtcggcattgctctattcaacatgcggaaacgactcatgtggagtaagaccttctttagaacggacatctgcggatgcattccatcgatcctcccaaaaaaggaaatcgtaatcaggagcatttggtgctatgcggtacataccataacggggctgactgatgtctcgggtagaaagtcaaagctgcttacctcgttcatctgtgtggccttgcggattgacacctgcacagtataactattgaggggtggcaccgtggtgtttgccacatttgttggtgtacaccactttgggtacatgtgccagagaacggccgcgactgacgaagtgacgtcgaggtttttcatcctggctcttcgcgagcctgtctgtcatggctgcacttctcgccagcacgcccacggcgcacgcgcgactaagaatttcctgcaactgccatcagcgtgcgcgttgctgcaccgttgggccctgcttgccggtgccagcggcggctcgtcgcgctggactgcggacgggcgccggggctggcgtcgcgaggttttttgcgacacgaaaaaggccagcggcatcgtgtcgtcgcgttgcactcgtcttcgccaatgaaattgctccaaatgcgagagcgggctaggtgtgtcaaaacgcggtgtgctggaaagcccgtcgctcttataagtgtactttggggtaattcaggcgtagtctttccgagacgcgggcaggctcgccgttctcgctcagacgacgacgcaagggggccgtcacgagccaagaggaagaggccccgagtacgacggatagacggacgtccagttcggattgttgcgctggccaaacgccaccagccgcgcggaggtcgcccagcagcagcagcggtagagactcgcccacactcgccacctgaccagcacagcgacaggggtacgtacatccgtcggtaggaaggggggaaggggaatgcccgagcctcggacgcactgatcttgacgtcagacggcagttcgttcacttgggtagagcacgcgtgggctgacctcttgctgtccatctatctcctccgtcctaccaggccgccagccatgtcgttccggttcccccgatggggccgcaagaagaacaagagcaaggagccgcccgtggggggcaacaagtactaccctgacggcgcctccgccgggggcgtcccacgcgcgccgccctccgcgcccgccggccgcacctacagcaacggctcggactaccagtcgcagcagtcgtggcagtccaacggctcgatgccccccgcgccggcgtcggcggactaccagaactcgggcgggggccgcgccgcgccctccgcgaaccgcggcgcgccgctgccgttctcccacccgctctacgccatggacgccgagggcatgatccacctcaaggccacgggcaaggggctcgacgactcggacctggccgtgcaccaggacgagatcatcaacacggtcgtcaagtacgtgcaggactcgatgcgcaaggagctgggcttccgcgaggtcttcatcccggccaacagcacgcccgaggcgcccgtcaaggctaacgtcttcgtgtcgcgcaactacgagtcgtgcaagaagctgctggtgttcgtggccgtcagccgcggcctctacccgggactctggagccgcggcctcgtgctgcacgccggcgtcaagagcggcagcatgctcgagtacttccgcaaggccatcgacgagggctacggcatcatcgtggccaaccccaacaagaacgtcatcgtcatgcgcgacggcaagcagcggctgcagatccccgggtcttccagccccgaggagcacatggactcgctctgggactcgtacgtcgcccggtcctccgccaggagggtctacttcctcggatactcgtacggaggcgtgcttatcaagtacctgctgcagtcccgcggcgaccagctcatgcgtcgcaacggagccatcgcgctgatcgagtcgagccaccgtatcgaggacggcgactcgcagtctgtcaagtccatcctggcgcaccgcaccatgtactgggaaagcaacgaccagctcttccagaccaagctggacggcgacgccccgcaccgtaccggctgcacgtgtctgtcggcgggccggccgccgcgcgcgcacgcgaaccactactacgtcactgccttctgcatcaacaagatccaggacgcgctgttccggttcctcgacacgcgggacgccaccacctacgtcgccggcgagaagcctgtgccggatccacctgcttcggcgccggcatacatgggcaacggtgccgccgccccaagcggcccgcagctcgcgcgccaggagtccaccaggcgtgaagccaacaactccaagatgggcaccagtgagaagcactgcaacctgtgtctgttccacttcacgctgttcgaccggcgtcaccactgccgcatgtgccaccgcgctgtctgcaatgcgtgctcgcgcgaccgtctcttcctgcccggatcgagtacggcccagcgcgtgtgtaccgagtgtgcgacggagggtccgcgcggcaacaacaacaacaacaacaacaacactaacaacactaacaacaacccggcggccaaccagcctcccccgacctacccgcgccttaaccgcacggctagcgacgccgtggccacgaccaactcctcgcaggatatgtcccaggcgcgcaaccgctcggacacgcagatgtcgaaccagggccggtcagagtcgaacgcgcagccgcctggcaactcgaagctcagtgtggaggacttcgacctgctgaaggtgatcggtaagggcgccttcggtaaggtcatgctggtgcgcaagaaggtgcccgatggatcgacgaccccgaacgccatctacgctatgaaggtgctaaagaaggcgtccgtgttcgccaagaaccaggtggagcacaccaagtcggagcgccgtatcctgcgcgatatcgaccacccgttcgtggtgcgtctgcggtacgcgttccagaacgaggacaagctgtacctggttatggactactacaacggcggctctctcttcttccacctgcgcaagtcgcgcaagttctcggagaagcgcgctcgcttctacgctgcccagctgctgatgtcgatgtctcacctgcacgagctcaacatcgcctaccgagacctcaagctggagaatattctgatggacgacaagggtttcatcgccctgacggacttcggtctgtccaaggagaacgtggacgtgcccgacggagccaagaccttctgtggtacggccgagtacattgcccccgagctgctcaagggcctgccctacggtaaggctgtggactggtggggcttcggcacgctgctgtatgaaatgatgaccggccagacgcccttctttgaccgcaaccggaagcgcatgttccacaacattctgcaccgggacgttgtattcacgcaggccttctcggaggacgccaaggatctgctgaccggtctgcttcgccgagacccggccaagcggttaggctccggcccctcgggcgtgcaggaaattatggaccaccccttcttcgctagcatcgacttcgacaagctgctgaagcgcgaggtggagccgcccttcaagcccgtggtgaacagcgaggccgacacgggcaacgttgccaacatcttcacgcgcgagatggcgcgcgactcgccagtgacgcaggagctgggcgccacgcatcgcgcgcaggcccacttcgacggcttcacgtacatgcccggcaacgagcacctgaactaagcaagagttgacggaaggcgaaggatacggaaggccccggattgttagacgactacccgcccccaaaggacgccgacgaagttgagggatggagggagcgagctgcatggggaaagctgccgagccgagcaagtagcaagaccagcgtggtgaagaaaagtatgtcgggcgtggtcgtctcgtgcggtggcagcttcgttggcaaaacccgttgcagcgagtgggtaaagggagacgacacgagcgagagagccgtgtcggtgtgtgttgtgtacgagaagcgagaaagggaaggaagaagagcaagagcgagcgagctgacgagaggatgcacgacctgcgcgtgggtcggagatgaatgaaaagctagctcggcgctgaagcggagatgcagtgtagcctcctaccagcaaactcgccattttagttttagctttgcgagtggcataagatgaaaaaagagaaagtgaatatccatccgtacgtctgtaatctctctcatgcgctccaaagcactacgtgttccatcatgcagctatacccctcaacaggtattgtcaccacttcaacttcaactttaactcggatccaagattcgccattgcgagcgtcatgcagtgcagtgagttgcgcgtattcttaggctgcaggtcttcctccacttgcgcgatgccttatcgcaccttgtgcgtcttgtacttggtcagagtgcgatggagactgcctaaatatatgggtatcatcctgggacttgacgaagctctcgctcttctattcaagccgaggcttctattctcatgcagcaaagtctccgttgccaaggatgaaagacgacgatcactattgatagcagcaacaagcccggcggccaacaatagtgcggcgctctgtaactcgtcaacggcttgcgaggttgttgcggttctccttcgctgcctcacttcccaactttccagctttttagcgagcgcccagagcccccgggcgtccctttccttcgcctcccgccttcgaaagcctccagcacaaacatgagcaacgtcaacgagcccattcgattcggtgatgtcgtcaagctgcagaccaagtcggcgtttgtcgagagcgccacccccgcctgcttgggcttcctggaactccccggcaaggctcagacccagctgctcgtcgtgcctccagtgaaggacgaggtcaaggaccgcttcaacgaggccgagttcatcatgtacgttgtcgcctccttcacctttgacgccctcaaatttccatactcacccctccccttgtctggtcttgactacagcactccgatccgaggtgagaagcagcaggcaaacggaaccccgttgacgtaccagaccccgttcgtgctgcgcacctcggacggcaaggacggcagcacctactcgctcaacaacaaggtcacgggccagcgtgagggcatcagtctgcaggtgtcggcctccaagggcgagatgtacatccaggtggagaaggagggctgcaccaacgccgcggggctccactacggcgacgacgggctcagtctccacgtcgtggactcgaaccgcgtgcgcaagacgctcaaccacgtgctgactcacgtcgccaagcccaagagcgacacgcccggcggcctcgccacctgcggcgccaagggctcggccctgaccttcagcttcatgcgagccgtggacgccgagggcaagccccagacggagacgcgcaagttcgtcaagaacccgcaggcgcggcgcaccagcctcgacgcgctcagtccggctaagatggacgagctgggccgagccgaccgtatcgacagcagcgactcggacgtcgactccatgagccgctccagcagcatcgccggtctcagctcgaaccccgcgagtcctcgtggagctggcccggccaatgcaatggcgacgcccgtgagcgctgcggaggtcgccgctcgtctcccagcagcgaaggcctcaaccaccagcagtgcgagcgcgagtgctaacagctcgtcgtacgagatggaggtgaagcctggcgataacaagacgactgctgctgctacaccggcctctccgcccaaggatgcggccacgaaggcgaaggcctcggcgtctcctgctgcgtcgccggtgaagcccgccgagtcgcctgtgaagactgcgacggcccctgttgcgtcgcccgtcaagactgcggagcctgctgcgtctcctgccaaggcggaagctggcgctgctaagcctgaagccgcgaagaaggagccgacaaaggccgataccgccaaggctgagaccgagaagaagacggaggcgaagaccgagaccaagcccgaggctgcgaagccgatgacgacggccacgcccccgccgacgccaatcaagacggaccagggtgagcccaagacggttctggccgacgcctcgaccttccctcccatgccggcgatcagcgggccggcaccttcgcccgtggtggtgtctcccaagtctgcagcgtcgccaaagtccggtggtgctaaggcgggagcaggaacccccactggtgcggttccttcgtcgccgaagatgctgaaggaggaggaagtcgcccagttgaaggccgaagccgaggtggagaagctcgagccggcgtgcggtgccaagtgcagcgtcatgtaaccagagtcgctatcactcgctcgtagatctccaacaccctctgcatactattaaccatttatgaaagcttcacggcttctccgtcatcttgcccaccatactttctatcacctcgtgagctgcttgaacgctctcttcaccttccatactctcatgttcacggcgctgtttgcgtcgatcacgctgcagtgctgcagctgcactctcacgctttgcgatgcgctccagcctcttttgttccagagcttcacgctcccgagcttgggcatctccagcagcgctgatcataaaaccttcgtctcttaggtagagctcagccaacagccctcgctgctgcacgcgcgtagagcggaacccctcggagttttccagcacaatgggagcgtagatcggatccatccagcgagccagagtgcgccgtacgaaggtcaactgcggcgctgtggtaggtgagcagaagctcaagccgcgcggagctcctggacgctgacagtcgtgtgttcgctgagcccgctccaaagcttccgaggcggtgatgccgtacacgcggccaagcagcagcgccgacacaattcccgtgcgtccatgacccagacgactgaagacgtagatgttcttgcctgcgcgcagcctcgactcgacctgctgctcgaggaatccaatcaactcgtcgctgtctgggaccccgtcgtgctcgatcgggaagtacagaaactcgatctgcatcatgcccagtcgcgcgacctcgtgcgacgccttaaccgcttgctgctccgccagttgcagtcgttgttcaggcgcttcacgcgcctcctttatcttggcttcttcagcggcgtcctcgtccagctgctgctgcattgtcatcgacactctacggttcttggtgttcttggttccagagcctccaatagcatgcgcggccgcgttagcagcttcgacgtcgaagtcagccagtgcctgctgcgcgagctccacgtgccgcttgctgatcgtctcggcgcccttcaactccatgcaaagggcttggtacttgctgcgcacttgacgctcgtagctccactcagcgtcggagcttgcacctgctgctgtctccgtgctcttgagctcttgtggctccataagacagacaaacacgctgatctgctgaagcagaacactcgtcgcgaagtcggtgcgtgacacgagtcgccgtgcctcgcggaaggctgggccgatggggcaggccccagctagcacgcgtcctcggatgacccagtacgaagtatctgctgggcccgcgtggttcgcgcggaagagcttgtacgtcgccatgtcttcaatgatgacttgcgtccccggcgcgaccgatttgtcctgcgcattgcgacggcgcgcccccatccgcggcagtttgggcagcatcgccttcattccgtgacttgggtgccatgtgatcgctggcggaggcggcggagagctcggacccacagccacacgccacgcgcgcaatgcgttgcgcttccgctgctcgatctgtcgcgtgaggaagtcgtagagcttgcgcgcctcgatctgtcggcgtcgatagagctccagcgcatcgactgaagacccaatcgccatactcagcagacgctggcgctcctgttgtcgcttccggtcggcaatgcgtctcgcccacgcttgaagaactccagcagctatctcgcggttctgctgctcctctcgctcccgatggcgctcgacgtactcacgccagagtttccaggcaaagcccgcgtacacgaacagaagctgctccagaatcgcccgaagatgctgtcgacacacgcgctctgggaatactatatcgtgctgcgcgaccatgaagaagcggatgcgagtggcaggagcccacggagtgggtactggagactctatctcctcgttgaaggcgtcctcttcatgcgcttgagtgtcgtcggggagagctacgccgcgttcgaatggcacggcgtcttcttcttgcaagtcatcactgcgtccgatgctctccatccacttgcgatagctccacgtgccttgagagagttggtggtggaatgccgcgtcttcctggcgcgtgagtcgcacaccgaactcagtggcgagtgttgcagcggtctccgcaacaacctcgtgcagtatatcggacgatgggaacgcttcttcttcgtcttcaccgtgctggccttcacagtcatcatcatctagctcgaatctgcgccagcggtggatgcggccgccttcgagttctcgtcgaaacttggcgcgcgctatttgctcagccgtgacaacagcacggaacgcgccgagctgcgtggggtacacgccgatctcgtgcggccagaaggtctctccgacgtccacttcgctttcgttgctgatgttccagccgggcagcgcgagtgtggcacggaagaagccgttgggcagagcttcaacgcctcgtaaccacagcacgcggtggtaaaacgtgtctccgtttgaagtcgtggcgggctctcgactgaccagcgtaccgtagagcagctcgcgcggccaccgcgcacagtctggagctcggaagaagatgctcgtccctgcaggtaaagccagccgggacgcctccacttgtttggttgcaactcgaggagggggttctggcatcgtcttggtcgaagtcgtagacattgcgacagagacttctgaaggctcgacggcaactcgagcttctcgctcggaaattggagcttgactggtgctggtgaatctgccaaagcggatgctgtgcgtcgataaagatggaatctacacagcaggaaacacgagcgtcagcgacagatcctccttaaaccggcatctgtgctttacgtacgatgtggatggcatccgtgcacctgaaacacagagtaagaccacactcgtcgcaggtgaacaccgcagagaagttgctgcactcgtcgcacagttggggcttgcagtcagcgtcggcgttgaatggagcttcgtcttgacctgcgttgcctatttctggttccttatcgcctaatgctgcggcttctgaccgtagctttgcctcgcttgcgacgtaagggaaattggttcggatccattcggctacgaactcgcctccctcgtgttgttcgactaggtggtcatgatcgtcgtcctccacactttcgggctcacgttcctggtggtcagacgcgtcttcctctccggcaccctccataagcgcttcattgccaacgtcatcgagcccgtcttcacctgcgtcgacttcgttcccagacccgtccttgtcatctgcgtcttcatcaccctcaggttcatcgccggcggcactcctcccaaggctatcatcatcgtccagctcgccgtgcatcgtccacagatcccgactacgcagagacaaagggatcagtgaaccgaaccaaaaccatggccacaaacctacctacaaatccaggagccgtcgactattgaaacgtcgcaacctgcacgaatagcgaggaaacaaaccacgcagacgcgaaagggagcatcaagacgttcattcgaagctagctcaacgcgaaactcaaagggagcaaaaacgacacgtgtttgtgttcgggcgtatcaagacgggggtggacttcatccgaagctagctcaacgggatccgtcgtcatgtgtgttgtgtgtgtgtgtgtgtgtttggtgtcttggcatcgccttcacacacctgtcgctctcttttgtgtgtgaattggagctctcctcgttcttttttgttttcttttctccttttccttcgcgtcattcttgaaatcagcaattgtgtgttgtgtgtgtgttttcgcgtcttccggtccgggactcattacttcatcatcgctgttctcgtcccttcaattcgccgtcagactgtgtgtgtggtgtgtgttgtgtggtaatcctgtcagcactccagcctctcgtcattcgaacccgggctgtggtcgtcgttcctctcggtcgagtcaacactcgcaataggggggttccctggccgcttcatctagctgttgttcatcaacgagcccgagcggcggtacgcgtcgcctccaaaatcgttctgcatgtgtaggcggtcgctgtcgctgccgttgggcgccatcgcgttggacgagctgaagccgtagaggttgttcgagaacccgcccgacgcctgcggcaccagcgcaggatcgtagaaggacgacccactggacgcccggcggttgttggactgcgagtcgaagcccagcgagctcagactgccgccatcccacgaatccggcgaaaccaagccagcacccgcgctctgactgcgctcaaagaggcgacgacccgagctgccacctcgaccggcgctcgcactgcgcatcggcgtcgcggacgctcccatgccgctcgacgccgcgcccgacagactgggatagtccccaccgaagctgatgttcacgttcggcagcatttgctgcaggaacgccagtccaccggatcctccgcccagcgcaccgccaccaccgagagccatgtcgttgccgcggaagtcgccaccaccgaacgagctcctggaaggatggggaggcggcggcgcgtggtgaagctgctgagagctgcctagcggcgggaagcccgaccggtccgcagtcgacgggaacgccgacggtaccgacggagggtttccgacacgaggagcgtcaaagccaccgaacgagctgcggttgttcactgtggtaccgtccagcaactcgtagcgcgccgtcgtctgctgctgcatgccacgaccagcgtccgcaggcttagcaaacgaaaaccgcgatgtgcgtgcgtccttgggggcggcagcaagaggggcgccgtggttcagaggcgtcggatccagctgcacacccagccgacccgcgagagcctcggacgactcgttccgctggctgaagatggcgtcgatggacgcgaacgacgatgacgagctggcagacgccgccatcgtcggcgcggcaggcgggaacgggtccagcgagctcttgggcgcgttagaggacccccacacgtctccagatactggcgacttggacgtgagctcccgggcgctgctggcgcgacggattccaccttcgaagccgagaccgaagggactgtagacgcctgctgcactgctggtcgctgttgtctgctcctcgctctcgctctgctgcactgacggggtcgggaacggctgcgcccacgccggctcctgagtggacgaaccggtcgccagcttgagcgcttccagcggccctaccaccgtctccagtgccggtgtgttgtcttcttcccgagatgtgtctacgtgcagctgaggcttattgcttggtgctggttctgctggagcgggcactggtactggtactgctgctgctgctggtacgcctgaatgtctgctgctgctactgctgtgtccgcccgccacgatcttgctataggagtttcctcttgccaagctgctgctgagcggcgggtattctgtgttgtgtgctgctgctgctgctgtgtcgacgcggtcaggcgacgaagaccctgaactattgctgctgtcgccctgtctgagtgctgatacggccgctgcgctctgtgactgcctctcgaactgctcctcgctgtgtgacctgagcagagacgcccctcttgccggagacggcgccctagcactagcactggcactggcactagtagatgatctagactgagcacttggtctgtgaggcggagggaaccgagagccttcccgctcctgcacctgcccatttgccatcgacatgtcccggaacgcagccttcccagagtgcagcgctgcgtgcaacaagcaacacttcactcagtcaccgaattctctaacctggaagagagagaaaaaaagtctctaaactccgtcgcaaattctcacctgactgcatctcctccttggtgaagctgtcgtcctcgtcgcccagctcgtgcaggtacagacagtccgggttgttacactgcatgttgcgcagaaaaaagttgcagtacttggtggtgccgaacgacgccctgggtagtacaactctactgtcagtccacctttccaagtgaaaaaaggtagaagcattctactttaccgcagcagactcccgtccaggtagtatccgtctattgccacaatgcaacagagcgcgtcctccttgttggcaaacgtgatgtacgcgctggctgttgcgttctggcggtccgcgcttaagtgcgacttgttcaccacggccttgacgatcttgccgtactggccgaagcattcgttcgagcggagaatgtcctcctcggcgaagtgcacgggcaagccgattacgtaaacaaggttccgctgcatcacgcgcacgttctgcaggctcttgcggttcaccgtggcgctcttagcctgcgcggccgagcgccgctcgctcttctccttctgcttgcgctgcttggtgcgccgcaccaccctgcgagcacatcaatttgccagggttagacactgcgtaagaagtttgttgctgtttagcactctctaaccgtttagagagtgctaaccggttagagagtgctaaacggtagttaggtagttaggacgtgacgcactcctcgcggtccagcgggttcttctgcttggagagctcggcgtagggctggcggcacgcggggcagagcccgttgtactcgttcttgatctggtgccagcaccagagacacacctggtagccgcaggggcacgcgttgaacgtcttgtccgtgatgtccagctcctccatgcacagcgggcagcagtcgggctcctcctcgtcggccatggcgaattctatgggggcaggagggggcggacggttagagaggggggagggcggttaagctagtgttaaagcgagtgtacgcacgtcggggcgggggtcgtggggcgtttaggtagttggcacttgctctcgcgctttgcgctttctctctggcggctggtgctgatcctttcaaagtcgtcgtggatcgtgtgcgcgcacaccaacccgcggaagacgatatctatcaagcgtcggctagatatctgattatgcagggttcggtggactgaagcctgtcgtactgcatgctttcatgccgttcaataggtcgtagatcagactggcggtgttagctaaacatggctccggcgctgcccagcgctctctggatcgccctctatcgtggccatcaccacacatcatacacccgctactggtataatacacgcacgcagacaaaacagtgctttcccctgcaagtgacgtcacgcggcccccgagttgaagtggtgcatctcccgtttacaagaactctctgccccactcctctctccctctacaagagcaatgtgcctctttgctagaaaaaagttaaaccgctggttgacccaactcgtcattcgccaatttgcgccgttcgtgccgaccatcactctgtccgatggcgcacctgccgcacgcgttgatgccgcacgcctcgttcttccccacggccaaggaggtctcgagcggcgtgcagtggttcaaggaccacccggtgctggccgccgcggccgccaccgccgtctccgtcatcacgtacctcaacgcgctcgagctgcccgaggccgcggcggtagaggacgacgaggagcaagagcaactagagctggaggccaaggaggccgccgatacgcggaggaagccgccgcctcccgcgcgccgcagaggctcgccgtcgctctcgcgcaagggctcgggcgccgccagcgacggcaaactgtcggccgccgtgagctggtgcgacgagcacggcggcagcctgacgcaggtgttcgaggacgacgcgccgcccgtcgccaggcggggccgaaggctggaggacagcgacagtgacgacgaggcgcgggacgacgtggccgagcggttcgaggacggcttccggcagcaccgggcgctcacggacggactgcgcaagagcgtgacgacgcagcagctggacgcggcggtgggcgctgcagtgttaaacgactccgaggcggaggcggcgcagacggagagcccgcagtggggctggtatgtgcccatcacgccgccgcaggaccagttccacccggcgggagcgggacgggaatccgcggtggtggtgccttgccgtcaggagcagcttgtggacgatcctgtggcgtcgctcgcggtgaaaagcatgcgacgcaccacgtcggggcagatcccgtagggctggtaggtaggtaggtacctaaacttatgttattgtcaggcggcttgtacgtgaatgcagtcggtcgtcgaactgttcgtctgtcggtgagggttgaactgcttcttacagatccagtgtcaatgggtcctcttcgtcccctgcttcgatagggatctgacccggttgctccgttgtgactgtctcctcctgctgggactgcgacgccttgtcgccgagcactgcattttgggtgacagggttggcgtagctcggcggtgcagtctcgacgtcctcttgagtcatgtccatgctgtactcatcctcgtcgagtttatcatcttctccagtgatctgagcaaaagtatctttctcgtctccaccatgctgcggcatttggtccatgcgtgtaccgttccaagcgctctcgccgtccgacgaggcgtagtaagtcgtcgttgacaggtcgagcgcgtcctcgtacacagaagtcctagagctgttctcagccagcgatggatattccaggctattggcacgcgcttgatagcgtgaggggcttgtccggcgtgatccagcgaaagatggccgagttgccgtgaatacatgcggtactacagtgttcactgtcgggggtcctgcagtccgccgtaacactccattaacacccttcgcaagtgtatcaagatgtccacaagtctgagtctcaacgatctggtcgatcaccgcgtccaagcactgcacgactgcactctcacgacgaatatcttccatcgaccagctcaagaagtcgaagtactggcggcattcctgggcatgcatcgccgtccaagcttgcagcgcgtcgacttcttccttgacgcgtttcgaattctctcgcatttcatcagccgagctggtacggatcgtcgatgtcactggctgatgaacgacggttgtcactgcaggttttgcttgtagatactggcgacactgctgcgcatgcgcctccatccaggttcgtagcgattccagttccgtttggacccgttcagcctccgtcttcatttcttcagtaggatgagtcggtgccgggggaactgcaacaggagtcattattattttctgaagaagctgatggcaatcatccacgtgatcttttgtccaagtttgcaatgtcttgagttcttcttcgatgcgccgagtctccgcctttaattcttccttcaggtgcgattctgggaccacggctggtggcgctgcagtctgaagtccctttatccgttcttgctcaacagcggtggctaatcgaagcagcatcgcgtccgagtcctccatgaacgcttggatggtctcccgcattgcgttgtgctgcatattgatttcatccgaagtggtgtgttgactgagctccagttgatgaacgcgatgagcaagtgtagattgctgtggcaggtactcttctcgactcgtctcgattgcgtggcccagagccttgacgacgccttccacgcgtcttctaagcttgtcgtcgttcttctgccgcgcctggacttccagagggatcacttcctccaacgtccgtagtttacgctgcactgccagcgcaacagtgcgtacagcctcctcgagatcgtgaaatcgcacacccacgtcatcttcgtgccgcgccagtgctgcatgccacatcctcaatccgtttccaagctccaccaaaacgcactggaagcgtgcatccacgtcacctgcgagggcttggaatatccgtttgacctggttaaactcgttgtgcagccacctttccaaagccatcaagtggtcgttcacgcgcgagaattcgcgcatgtgcgctgtcacgcgctggaaatcggtcgctgtaacgagctgtcgctgttcatccaacgcgcgcactagatctcgcttgtctgccgtcatcttcgagtttagtcgttccaactgagcgtccaccttggcatcgaccgctgcgtcacttttccaccttgcactgcggtctgcctccagctcgcttcgaagctgcaccatagcatcctgcatatcccttaactgccgctgaaattctacagcgcggcccggtgacgccgcttgcggatgctttgaactgacggacgccagaaattgtgcatgttggtcctgcgactcgaacttccgatgcgtatcattgatagcacccctcaattcgccttccaagccttcgacgcgatgtccaagtcgtgacacctcagcgaacaaaagcgcagacttctgttgctcgcgctgctggtgactcatatccgcctgcaacttgctgttgaacgaatgcgcgagtcgctgaagatcttcagcaattttgccgacagaaagctagcaccccattcattccaagccagggaagtcagtctcagatgtcgccaccacagggggaaacgatctacatgtaccgtacctgatcgctttcatgttgctgttggttgctcgaataaaagtgccgaagatgctgcaactcctcgcggaagtgcgcgttctcccgctcaagcgcgtgtacacgttctgccatccgatcaaaccctggagggaacgaagaggacgcagcgacttgaagcataccattggactggtcttcgggataccccgtgcgacttggcgagggcatgcctgcggctatagcttgcttcctgttggcgtcgccaaggaaacctccacccactccgcttccgcggcgctcgttgttgggcaagccattcgtcgatttgtgaataggaggcagcatcacgcaccaaacaccaaagctctgcaacctccccagtggcttgctgggcaccgcaccgtcgcttcaagacctgcaagcaaaatagtgtcgcataactcccattcccaatccaacgctgaacctgatcaacacaaacaccgcataacaagcataacttaagcagattgatcagcgccggtatccaagcaagaaacacgcaagcacagacgcctcgacatcctctctccatcatctcctccttgattttgtgctttgccgcgaccaccccacgcgcgcaggccctactaagaatctcgtctactttttcttggaggccggtgtctgctgttttgctttcgagggggcagactctttgactgctggtgccgtctccggcacagggggagcaggcgcgctttcggcagcggattcctcattagactcgtcgccactgggcgtgggctcccgggggagagggggctgaggtcctacaccaccaggcatgcctgggccgcccgcatacggcataccggcacccgggtatcctccgttcggcgagtagtatccgcgcgggttgtatccttgctggtagccgccgtatccgccgcgctggccgcccatcatgcgcatgttctgctgcggcatcatgggcgggtacatcataggaactccgttggggcccataggcaccgggtagccaccctgcatgtaaggaggcatccccatctcactgccttcatctccaccgtcgtacatccactcctcttgcatcggaggaggatagcccatgccagggtgcgggtacggcatgtgtccaggcgagccgccacggtacggtgacgaaacgtgctcttttactgccggcggcatcgcgaagctcggggtgaactcggcagcggcggcgttcagcttgaactccttggcgttcggattcagccccttcttgggggccgccttcggcgcgtcctccttcgactgcttagtcgtggtcgttgttgtggtggtagtcgtcgtcgtagttgtcgacgatgaggaggacttgttctcctcagtcttgctctccgtcttcttctccttcgcagcatccttcttcttcgggctagcgcccttggacttcgcagcaggtttcgagtccttgccatttaccagcgcaggcgtcggcgctttctgcggagaagaggaggcacctttcttttcgtcagcttgagccttgggggccggagccttcggcgcagcagcagctgatcgtccggtcaccgcttcgctgaaggagagcggcttgggcggaggcggcgtagctgcagaagcaggttccacctctgcagtagcagtgggagcaggagcaggtgcggggagacccggagcgcctgcagcgctagcgggcgctggcttagtcgccttagcctgcgacttgccaccgctagactgacgctgcgcattccgaagtgccggcggtacgtatgcgttgccggtagagttaccgggggcgcccctgcgatccactgaactgtatcgtgcctcctcatccagatcattcgcgtgcttcccaccacgcacagcttgtccgcgctcctcctgcaagtggaagttgccagccggcgactggcgctcgatttcctgtgcgagtcgctccgccgcgcgcgactgctctgtggagatcttggacttgtccagcttggtcgtataaatattctcgtcgtacgtggacacgacgccgaagagcttctcgttggcctcgaactggttccagccagccttgccctggttcttgcgtcggccgttgggcgccgagtcctcgagcgcgcccgtgtccagcgccgggtccagccacgagctggcggcttccagctcgcgtccgaacagatgctcgcccctctggccgctgatctccgtgtccgtgcggaagccgccggccgccgccgtggctccggccgacgcgaacacaccctctgtgtagttgaccgtgccgtccgccacaaggtgcgcgagctgctggcgtcggaagatgacggtgctgccatcttcaaaaggcttggcgtcctcggcgctgctcagccgcttggcgttcttgagcacgaccgagaagtcgtccgggtccacgcagtccagcacgccggcgtagcgctcctcggacgccgcgagccgcagctccacggccttgcccaccaggaaccggaacgcgaacagcgcgcggtggcgcagctgcctctggtgtgcatctgcctcaaataataataataacaataagcaatatgttaataaaaataatactaataggaaaaaggaaaaaaagtatctaggaaggtagggtgagcctaccgctgaagccggaggtaggtttgggcgggctgggcgcgaagcctggcgggggcgcactactcgccgcgggcttggggttgccccagggtccggacacaggaggcggcgccacgggccgaggacccgcaggcgcgtccttgccgttggcgctggcgttggcattcttgggctgctgcggcttcttcttcttggcgcctccgctcttgcgcgccgcctgcgcctggctgccggccgccgcggccggtctcgacgtcgtgttctgcatgtagacccgaggagaagagagaagaggaggagtaggaggagggtagtgtagagggggaagagcgagccgggctgtcgggcgctggctgctgctgttgaagcctctttttggctggacgcacacactacgatccccctacccagcagctccgttgcaggttgagggggggggttcatacccctcaagttgcaactggtagagtaaaacggactcagattcagacggagctacacatgtattatgtatttgtagcttctggccaacctataacacgtaagagagtaggatgcacacgtcgcagccaacttcaacttgcgatcttttggcctcaactcgccggcgcggcccggaggatgccagcgctcgagggctcaaagccgccgacgtggacagagggcgtgcacgagtggatggtgctggtatcgagggggagctcaagccgctcggcgatattcagcaccatcgcgcgcactcgagccagatggctttattcgtccctccgtaggtgatccgcctgtcctgaccgcccaagcacgcgacgcccttcagctcgatgatgatgttgatgtcaacggtcagcatcagaagctccttgtcgctgagggaggccgcgggcttgatctcaaagtagacgggccgcccagccagcccgtccagcttcaactgcacatcgtagttgtccacggcgctcgtgagataccaccccaaggaccgcagcgtcttggcgcttgacgtctggccgagcctcatctcttcacgcgctgtcgagtacagctgcaccagctctcggaactccgtcgggacccgcttgtcgaacggagtcttgaggaagcgcttctccagcacgtccaggatctcgcgagcttgcggcgccctgtcgacggagacgcagagccgcgccgtgcccaccacaaactccgtgaacttctgagtcgtctcgcatagttgtcgtacaggagcgagctcgacgaccgtgagggccgcgtcctgagcgcgatacagtttctgcatcaagtgaatgccgtgcatagcttcagccgcgatgacgagacggatgtgatgacgcgcagagttcagcttgctcggctctgaaaacgtgctgacaagactgcggagctccttgatcagtctgcaggcgtcatgcgtatcccgggccttcttactgacagggatgtctgggtctcgcagccgagcgaaaatggcgattgagagctttctgagcctgtcctccagaaccgacagactctcagactcgtggtcttcgttgacctcgctgcccgctgcatccagaagacgcagtagcactcgtgccgactccaccacggtcgtgccctgctgcacagcagcagccatgatcgacttttcttcgacactcttcttgtttttcttgcccttctttttattcttcttcccttcaccggtgttcatggtgaggttttcacgcgcagccgacatcgtttcatcgtgctgcccgccttgctgagcagccataaattgctgcagcagttgcgcggtggctggatcctgtgcattagtacgcgcattgagcctcccggcattcatcgcgtcgaaggcataatactgagcggtgcctgcagcgagcttgcgcgcccactccttgtttgaagtcacctcgctcaaagttcgccccttcccatccttgatgcgaaggtccgctccaaatgcctgaagcatacaaaacaagccccagtgtccattcttcacagccagatgtgctagagtttccttggtatggaatgtgggcgtgttgatgtccaccatgttgtccccctcgagaataacccggacaatgtcttcatagcccgcgttgtgcagcgccatggtgttggggtagagcccacgaggaattttcaggtccttttgcaggggcgctttccgacagtgcaacgtaggctgtatgatcagggcccccatttgaatcatccaatcgaccgggtcagcgtcgtgagcaggtccagcagctgtttggtgaaggaggctacacagatcaccatacataggatccaaaccttgctctggtttctctgaaagtaatcccatcagatcggggtccctcttgagttcgtacttgaaatgctcgaggtcactaccagtgagcggacccttgctgctcctcagcagctccatcagctccatcagctcctcaaacacttcctcatagtcctcccgtcgcccttcctccagtcgaccatattcttgggttgcgaagttcggctgtgaaggaagcgtgaaatatttctgctcacagatttgaggcagactcgcaaatctcgctttaatgaccgccgccacttccctgcacatttccgtagcaaacagcgtatccagcgtaatggtagctccaggtatcgcgctggtgtcaaaggatccgtctggcttcatggcatccaagagcggcatcaaaagcttcatcactgactcctccagcgcccggttcacccgctgctggcgcgattcaccagcgaccgagtgtgctacgatttcctggaaatcatcttgacacccaactaccttgatcaagccagggaacgtatccatgaggtcttcattcagcttcaatagatcgcgcgatagcacacgcgtgtcaaagagttcctccgagcatacatcagagattgccaccagtctatctttccacaatccgccactcagaacggacttgtcgttcaatctcatcagtcggaatatcttcgacacgtcgctcaagtgaaaggccttgcgcttcttgtaggcttcgcttccaacagggaaagtctctccacgacacacggcatcaaccgctgaagctctcaaattcgaactgagaaggtaagtgtggtagtatccaccgtgtgtcgctgcagcacgagacggagtgaaaatttcttgaccatacaccctcaacaattcgtcgaaaaatggaatattttccaggtatccctcttacacaagcgcattgtacaggtggccgaatgctcgcaatagtggtgttgaaaagataacctcattcgcgatgtgcagatactggaaatggtgattcaacatcagaaatcccgcgaacagcgggttcgcacgtccaacatggcgaagtgctgtcgattgcttaatctctgaggcgcagcggcgtagaagattgttggctttgttgttggcaagcagagctttgttgttttccactgcggcgtccatacttttcatcaactccgttgagtatttgtatgtgaggctgatgttgcgaccaagccctccacgtccctgcagagctgccacagacttcatccaacaaatgcacgcgaaacaaactgggattgtcacctcacgcgtcgtgaaaaacttgtccataagctgcatgaccggctccatcggcgccaactcgatcccggatttgccagcattcttccgatccatcatagcgttaaacaacatgggcagctgctgcatcaggaagaccttgtcgttgttagtatcaggaatctggacgtacaggggcgtccgatcttcgccgtaagtttctccaaatactccactcggaaagaagacgccattgccggtatggctatcagccggaaccgaggcgacaaagctgtccagcgtcatgcccactcccagcaactcgatcaggaatgtaccaggcacgtacttggccggcttatccaacttactatcgtacgcgatcctgagctcgtccatgatgctctggtggagctgcaagatcctctgtcggaagctcttctgcgagatgttcctcacaatgttgaacatgtccttggccgaccggagcgtcgggtatttcagctgcagcttggccgtcagcgcactggcagtgtccagagccagcttgaccaccaccgtggcctccaccatggtgcgtttctcctgcttcacttcacaataaaccttgtacacagcttccagcagctcgtccagctccatgaacaagtacacgagctccatcctcaactcatcggcgaaggcctcctggaagagccgctccctgtccaccttggcggtcttgggggcttccggctccgccacaaaggccccctcgtcggagaagaagtcctcgtccacctgcagcacttcataatagttctcgaacttagcgttgtccagctccaccgccgccagctcctcctgctccacctccacggtcttgagggctcggtgccagctctgcagcagctctaggaagtactggtggccgacctggccctcgtcgtcttccgggaagaaggcggccacgtgttcacgcaatatgatgacgtatctgcaggccgcgagcgccttgggcagctcctgcagcagcttgggcgtgagacaagaaggatccgcggcgatctccctgaccacctcgttgaacgcctccagctgcacgcgctgcgctgcgtggcgcccgcggcctcgcacgcagcagccagtcaaggaagaaggcggtggcgcgtttgtagcgcgcgtacttgcccgcggggaacgaggacatggccgatagatgtggcgaggacgatcctcaaagctttacttgacgtcctgcagtggttaacaatcaaaagtgtggtgtgctgcacacaacgacgtaaattaccgtaaagaaaacttgcaatgcaatgatttacgtgttcgcgtagccaaattacgcctgcgcaagtctcagtttagctagtcggcggcatagtgtggtgtccgcatacgtcgagtctcctatggctggtagtgaatcagcaatagtagtcatgaaagccttccatttacgtcggtcttgagcaagcagtcgaagtctctccaagtctgagctggtgcggacggggtagccacaccctctacagtgcctacagtaattagtctaggctcaaaattagtctggcttcaaaattagtctgggccagactaattcgtgtcgagcaaaaattgacgtcttcattactagtctggccaaaaatgttcataattagtctgacgtggtgaccacgattctagtccacccccacctactttaaggcaccgcttgctgaaaaactcctttgacagcagccaatttactagatctcgtacaatatctgcaagatataatactaagtagatacctgggtatccaactcatatatcagccttctctaaccattagaaaagcaccatctgcgacgatttagtcttgatttctcttcaaagccacgataatatatatatagctacactataaaaatactaaaacaaatacgtataaacacatcatttcacaaaaataatggttttcttactggaaaacagacagttttagatattcataattagtctgaattcataattagtctgtcactgttggggccagactaaaaattgtgagcgatgaaaaatctggtattcagatttagtctgggccagactcaatctgaataccagatttttcaggcccagactaattactgtaggtactgtagcgtcaaccaccatgtactgaccggaatcctgcccctcgcggatacttctagtcactgcacggaggtatcgcccgcatgagccgtgatttttgggtgggggccttcgtggtgttggtcccttgctccattgtacctctatgccctcttctgctatctttacgagcttttcaaggtgaggatagccgtacagtactgtgcgaagccgttctggatccagagctttgttgggtctacgatcaccagcatcttccccacggacgaatctggtgaaatcggctagactcattttttgctcgcggatgatctgagagagagactcgcgggcgactttgtctattgagtagggtgaaccccccccgatctcgaacaaaccctttttgccggtgcaaagctgaaatcttgcacttgtcgcaataaagtttcttctagggctgattgaaatcgacttgctgatagtttcgacaagcagtacgtctcgcacggggggaaacgggctgtgccaaacttgtagatggggatttgtcaaagcatttggccgtccaccctggtcgttttcggcttcacagtatcgatcggaccgacaacaatctgcacttccctcagcctgcgagtcacgcactgttggcagtatgccgacgcgtcctgttggcctggggcagatcaccatatcagtcttactgcaagcttgacggcagtcgtggagtcttagtagcggccgacaacaacctgcacttcccacagctttcttctcgctaggcatagtgccttgctcacgacgctgggggcaggtcatcctgtaagtcgtattcaatttatttaagacatcacgcttgctgcttattacactgtcgtggtggccggtgtcgccgcgctgggttagcttcacttcttcatggtgggttgctgagaaggtgaattttggcgacgtgttacctgcaaaagtaacacactccgtctgatctcgttggatcgatgttccgtcatcttcgtgtgttgacagcgctaccacagacttcaaaggtagacgcgctgctggtctacccttggcgagtcatagatgcgtgtactcgtctttaaggcctccgaagcaccgattaatttccgtcttcacgctcgcttccagtttattcgggacgaagtgaccatgaccacttgggcacgcaccgtcgcgttctggtgtgtactcagccttggggaggtaccgcatgcagaaattgcgcgatcttccggtagcgggatcaacctgcaccggcaactgtcgtaatacgtctttaggaatttttccaagcctcttcttgccatcgcgttgggcggttgtctggagttcttaccaccagaagcggctggtacggctaccttgcgctcagcgtcgtctacttggcgatgcagttttacgaacattaaatcgcgcaggagtcgatcgtcctaagagcaacgtagcttgacctgtcttaaatcacgatcttccgcagtggctccacaaaaatcttccagaacattatttacccagaaaacaagtgccgataaatccttagccgaccacgtgacctgcatgagcgtctcctccagaaattccacgatgcgttccaccagctcaatcaactccgcacaacagtactctcgggtgtacgcaagaaagaccctggtcgcgtccaccacgtcttctatcgttgccgctggtgtcgccaccgcaaacgcagctgtagtcgacaggttatcaaagttcgagccacctgattccagccacatcattcgctcgtgctgcggtagtctagcaaagtatcacttgctctcaggtaaggatatgatgaaaacaagcaagtagtccacaatagacaagctcacaactaggtgtttagttcgggtgtgacccgaccggtatgcgtgattgggggggggggtcataccgattcagcatttaaaatgcgatttcataccggtttagtcattttcccctcaaaatacccatacatgcagccacatgtttattgtggatgtgcatgacccttttacgttgtgctatccacacttcggatcacggcatattgtgcattgtccgaacaaaagccaagtgcgccatttctcattttgctctcccgacaacaaattacctggccagcaccttgcaacaatgcgcttgcttctctgggtcctgctcgcgactctggtcgctccttgtgaacgccgaagcggccacgtccaagctgtcgagcaccgatgacacgaagatcgactctgtgtttgaggaccgcgtcctgactgccaactacaacgtcggcggcaacaaacgaagcctgaggcgtcatgacgacgtcaaagaagagcgagcgctgccaacctcaatctcaaaccttgtgaaccgtggaaaagatgctttaaccggaacgacaactagtctatctgcccaagcgaagaaaatgtacgagaagctactgcagcagaagttcatcaagctgtacaacaagggcgagacgcccctcaccctacgagcgaagcgcatgggaaccgacaacgaattcgtggccaaatacaaggctttctgggacttcgtccgcaagaacggaaatgtgcccaaaccgcaatgaagttggacctgaagaacgtgcacctctaaccactgtaggcacttgggtttactatgtagaattcaaggtatagtgcaatgcgcaccggtaatgagactggatattctgacaagaaagcaacattcatcgcactcatgagtttcttcccacagtttttttttcttttcttctcgcatgtgccacaagctttagcatctttcgaaacatgcgtggcaaaacaaacttttgacgtgaatagtgaacatcgagagtcacttgtgcctagattttagtttaaggtgaaatttgtactttgaagtatatttaagctgcgcatgcaagaaaagaaaaactgactacctattgtcaataatttgccatgctgtaccgagtgacttattgaatagtttaacccttgcgtgccacatccaactcgattgcgattgagctccgaccgataaaataaagctacttagggtccgccatgtcgaagatcgagttgtttgctgcccttcgaacccgacaaaatagctttcgtgggtgccccaaggtcttttcaaccaaaactcccgatgctcttttcaagtctttgacagtttccaagttccagtgatcttgcagcgtttccagaccttctccacacacctgcgtttttgacagaatacccacaagatgctccgccttcaacgatggcaaacgctgccaggcacacgaatatcatacttcttgccctcaaacaatggcactgagctcaggacaagcaggtggatttgtcgagtttgcatccatgaccataaaacatttctgcaaaactggataaagcggccgtgcgactggaagagcctttcgagatcatcaatcacaataaaaagagggctcacttccttgactagacgcttgacatatcctgacaccgagaatggtcccaattgctgctgtatgcgatctgttccaggctgaagctgctcccccacggcttgtgcaagcgcctggtttgccgtttctatagttatagcatctccagcagacgcaagccgaagaaatattgtccgacactgacacaagtcgcggtgaagcccgaatacttctcgttttccaggaggccaggtctcacggcacttgaaaatatagtttttcgctaaagctgttttacccattccagagccagcaacgactagcggaatctgtaaattgtcaggtttcggcaagttgttcgccccacagtaggataccagatgaattctctgtaatgtcttgacgacttcatcacgaaatacatattgcctttatccagagcgtacacaggatcgagttctggcttccgcatcggctgtataactagtggctcggacgtctggaccagcacgtgcacttctctcggtcttggtagatttacggaatctcggaacttgaattcctcaaggaagtcgctgctccccaattgcgtcgggttgtctactatgctgacaaagcatagcggtaacctcccaacgttgagacttctgatgtctgtgtctgtcacaattggccacgaaccgtcggggttcttcgctaggatcagcttgagctcggcgtctgagcacgcgatggtctgcgaaaacgccgcgtctttgagactgtacccacagcttcctgtcgagacgaaagatagtttctccgccagtgctggtgagcacgcagtggataaggagctcggtctgttccatcatgggtttggtactctacggagcaaaaaggcttcgtgcgaggacgatctctgcatcatcatgttcgttatattcaagatttacagcgtctgatacgccgtcgcggtgaccagggctttgccctctgtctcgacttcgccaaggcctacgatagagtgaactgggattagttgtttcgggtgcttgagcgggtgggatgtggaacagggtttcgccgctggatccagctcctgcattccgacgttcaggcgaatggaccactgcaggagatacttttcccgacacgagggtcaaacagggcgaccctctctcatcgctagtatttctctgtcccacgaaagtatggttagtttttttgtgtaccacacaacaaatgtcattggtcatttgacgttggttagggcaaaaattggtttttgtccaatgatagcacacttgattagaaaaacctcgttgattttgaagcgagatatctcgcttacctgacctttccacaagctgtaattggttcaccaagctaacattggcaatagcaactcatcctgaaattgcgatgaattatcgctaatttttgatagaattacgaaaaaaactacgaaggactaaaattgctggcagaaaaggcgttgtgcctccttcagttctcacagataatgggcagcaaaaatcaggcgttagcgcctgcctttaagcttcatgataaggtctcacatggccaaaaatcttaagtagaagcgaagatagagcacaatttcgaaatcatcatactttcgtgggacagagaagtatttcttttgtcgattgaacccattggaaatctcatccggtatgttcccgagcacggcatatctgtctcaactgactttgttgccactgggctttacttcgctgatgactcaacgctcctatcgtgttcactagctggattatctctccaagcggaaattgtgcagcaatattgtgctgggtcaggtgcccgtttgaatcttgacaagtcgcagcttttggctttccatggagctcgagtgtcggctcctacgtctctagtcggtgttgctacatccgagtctgtcaagtacctaggcattcctattggccaccatgtgaccgatgaggttgtctgtgcctcgctcgaagcccgggttggtacgagactggcccggtggggcccacgagagcgtacgcatcgtggcagactactaattcttcaagctatggttctctctggcatttcaccctgcacttttcgctacccgatgctacggttaagcgtctccaatcgctgccagaggagtacttattgaccaggcgaggggatccatcccgtcattttgcaaagctggccaagtcttcgatttgctaccactcttctcgtaacggagggcttcagattcctcacctcgccactattttccgtgtgcagcggctaaggttgccacaacaacacgtgacaatgcccgacaatgaaccctggcgagccgctatcaccgcacggggtctgacatttcaggcggctccacggagcatccattcggctttgtcacctgtccgtataatgttcgatcagcgtgggtccgagttgatctcctctttacatggtggaaacgtacgtggaaagcgtggtctacagttgtgtggtttcaacgaggtgatctcgttgaccctgttcactttcaagcatctttgctgcgttcgtatatttggcactcaacacgcccccttctgcacggtggggaggctcccgccacgcttctaggcaaggcgggggcgacgcggaaatttcgcatgcaatttgctgctgagaccggatgtcgttgtctgcacgatttcatgaacgctgggtggcctgaggctccagcttttctgtcacgatttatgctggtggtctcgagtctatcattactatatcgtattcggcacctgatgaacctttacgtggatctgagtagtggcaatgttacgagatctggtggcctttatgaaggtccctgcattctaacaccatcacttcctctggttggagttcgtcgtctgcagcaagttattctctttccaaggctacagaagaccgatgtgtggcggctaattgggtccccccaatttgctttctgcgatcacccactcgcacaccaagtttccggtaccaatgcttcgaagctggccgcgacaattgcggcgactaaacttcttcgcagtcttgcccttcccgtttactccgatctgcagttccgcctcagctggatgttgctccccacaagatctcgtttctatttcttacggatacccggctccagtgatcttgcttgtgggtatcccaactgtgtcgaggtggagacagcacatcatctcttcctggactgttctcgcgcagcagtgctttgggccgtcgttatgcgggactggaccaactttgtcgatggttctgtcacctcgaccatgatctgaacactggaggagccccactgggcacctggtaggtatcgagcgcggagcaactgtcactactctggacgatcacgcgttgcatcgtcattcacgtgatttggacagcccggaataaacaccagttcgtgacccagccacgacgatctatcgagtttactctgtctttggcgctcattttcgagctcttttgcggtcgtccgaccaaccaacacgagcaagacttcgccgatgcctccgacagttccctacttcatcctgcttgggtcgcttcattgcaacccacccacggttattcaatctccggttgtctgccctctataccaacgcctcggggcgcctacgggctccaccgttgtagtctacgacgccagtatttacatttgtgtatgatagctagtgtacaattctgcatattgagaagtccagataaccaacaacacggttaatcgttaacacccccccccccgttatttctttacatcatatacacgcaagaatcaattatacaatcaatcccaacaaacgcgaatcgttatcgtacgaattcatgcagccacggggtcgcaataggccccacgcaccgaaatatcaaattcaccaacttgcacagtgcttatggaagccttcgattcgtcgtcattaaactggatttcaacaccattagccacctccatgacaatctcacgaactttcttcacctccagtttgttggcgccgccgtacagaactcgtctgccttttccgccaagacataccacgccactcagttccggaatgccctctaccgctgacttgagctcatcaaactgttcgttcgtcgtctccctctaggtgccaagtcgaagtagactgggtgcccaaccagcccgtcaagtcctcgcagaagcttagcgctccccagagcggcctccaagtaccattccaacgcccgcaacgctctggggctcgacgcacactccatacccacactatcgcgcgctgcagagtacatttggacgagcgctcgaaacgtcgacggatctcgtttgtcgaagggcgttttcagcagccgcttctccaacacatctacaccttttctcggtctacctgagctaattagacaagcaaaggtggcatgttttagtttggggtgcacaagaagcccaaattaggaaacggaaatctgaaattgacaaacaaagctgcctaaccttcattcaatgtgaagtggtacattgtaccaaaaacactactcgccgtacttcatgtcctccatgcgaatcgccgcgacgacaaacttcgctgcgtgaagctccatcctctgcaccatcgcctgcgtgatgcgcggtatgctcacatgcacagcacgctcgagcagctgcatgcgagcttcggtctttgagatgcgtgggccggagcttgtaggctgcgttcgggggcggttcatctcgtcgcgcatcagcgccaggtactgcttgatgtgccccttgagagcgctgaagcagttttcaattggattgcacatcgggctgtaaggcccgaggcgcagtaggacgaggtcgtcatgagcaggcaccagcgcgttcgtctgggaatgcgctggggcgttgtcgaagacgacaacgatcttcttgtcggcgaactcgttcttgtagacatctgcctccttgatctcagtgtacagtgcctccacgaacgcagcgttcgtgtccattttgatgctgccacggtgcgtacggtacgcaaccacgccaaacgcagaggacactgcacactggatctgcaggttacctcctttcgaaggcggcagcttctcgacagcccgcttcccctcttagcacgtccgcgcgtgcgcttcgtgtacaaactgaaatttgtttcgtcgaaatagagaacgaggtcggcatcatcgttgtggcggacaagagcttcggcaaaagccttccacgttaaactcgctcatgaccatggtgcgtagcgtgctgagcgtgtatgtgcagcactcgtccagccacagctccaaagccgccttgatctcgggcgtgaccttggtggcccgcgcaccccgcgcgggaggtcttcgacgcgtccagtgcgcacaaggcgctccgccgtggtcccggggaagccattgtgactggctacagcacgccagtcaccacctgagctgtgcgcgtcgaggacgcggcgacgctcttcaggcgtgtggggcttggggctgggcttgggggaggcgtgcggggacatctgtggggctggaggaagatcgaagaatgaaaactgaagcagccccgctgcgccagcctccacgaagcgcagctcgtttggctgcgctgattcttcatctggcatcgctgtcggtgaggcaacacctgcactcccgttcgcttcacctctcttcttcgctttagctttttgtttgctgtttgaggaacccgaacgctgaagcgcttcttcgcgctgcggagaaactgattttcggagctcctgcattaatgagtctcgatgggccatgctcctcatagatcctcgaaccgtcttcctttgcagaatactggacacaattttgcccctccactgctgatccgtagttacatcacatacacgcttcccgttgctatcgcgaagagatagatcggcccctaccgaaacgaccagatcgtacacatctcgatggccatgtttgacagccaaatgtgcaagtgtttcgccaacgtaaaaggttggcgtgtccaggtccagcatgttgtctgcacccacaatcgtgcacacaatgtcatcgtgacctgcaattgcggcactgtgtacagccattgtattcgagagaaccaccccgtcgcacttcacgttccgctgtctagacttcttccgacaatgtagtggctgactacctagcgcccccatttgaatcatccactcgacgaggtgcaaatcgtgactagggccggctgcggcttggtggaacagtgcacagagatcgtcgtcgggatattcaaccgcattgacgtcaatttcgtccgattctttacggagggacaccatggccagcaggtcaggatctttcttgatttcgtctttcaggtgctccaactttctttcacggagtggaccattgcttgtttgcagcaagttcatcagctcgtgaaacacctcctcatggttttccgcctccgtataccccttcaaagacgccgacccatacaaagtccgcctggatggggtaagtcaagtatttatcctcgcagaagcctgatgacgacgcaaatttggctttgactatggctgaaatctgtctgcatccttcatggagacgctcgcttcccatattctcgtttcgagcttccgccggaatcatactggggtccatggtactaccattttgctgcgaggaatccaactgtgccaagacaggcatcaaattctccaacgcgcgatcgaggcgatcattccgagactccccagggaccgcctcaggaagtagatcgaggcacccttcgctcaacacgtcgaacatttcacagagtacatcagcaaggtcgtcgttgagcgtcaccatgtcccgagagagaacgggcgtctcaaatacaaatatcggcagctttctccagcagatccttcggtgatgcgcctttcagaacagtagcgtcatgatgatgaagcaagcgatatatctgggacaaatcctccatgttaggtttcttccgttctcgatacgattcacttccagctgaaagtgtaccttggtatactccacggactccagtcgtactaaaccccgtactaatcagataagtgccacgcaccgccgtagcttgagaaggagtgaatatcatgtgctcgtaaatcctcaattcgtcgtcgaaaaacgtgatatgatcgagatatccttcgttcacaagcgcattgtacacgtggccaaacgcacgaaaggccgtcgtcgacaccaccaggtcgtgcgcgatgcgcaaaaactggaagtcgttatccagttcgaagaacccagccactagaggttttaagcgcgcaacctgctgacctcgactggatgccgctaaaacttgtaaaaatctccataatcgcctccggtcgtctttgaagccaagcctccataatcccctttattcgcgttgagtgcttaaacgtaaggctcacattgcggccgagatcagcatttccttgcagcgccacgactgacttcatccaaaaaacgcaagtcatgacagcctcgactgaagccttgcgtgacttgaaatagtcctccgtgagcttcataaatgagctcaccaatccaaactgatcaaatccagatccagtgtggttcaccctatccacatacgcgttgtacaacatcggcaactgctgcgcgatcaggatgaccagactagagctggggtctggtagcacgtactcaggagtccggtcttctccataactttcccccaaagagccctatagaaacagtctgcctccttcgggaaaagacccgcaaaagtcttcaacgtacacaaaacgttctcgaagtcaatcagcagcatgcctggaacatgcgtgaaaggcgtcccctcctcaaacttctgccgcgcagcagtgacagcattggaaacacgcttctgaaccctctcggggatttgctccctgagtagagtgaatacatcttccgccgtcttgagtgctgggtatttcagctgcaactgcgccgtcattgagctaaccgtgttcatggccactttcgccactgtggcctccaccagcgtgtgttgctgcttcttcacttggtcgtagacgtcaaacaccccctccaccagctcctccagctccaagaagtagcacaccagctccagcttcagatcttcagcgaacgcctcctcgaacagcctcttcctgtccgccttggctctcttggggaccccagaggccccaaagcccgtgtcctcgtcagggaagtagtcctcgtccacctgtagaatgtcgtagtagctccgaacggctctaccggggcctggtgttgttgctctacctccatccccttcagagtgtcgagccagctcctcagaagctcgaggaagtgcattgacacgcagcgagggccttgtgaagctcctgcagtaggttgggcgtgagactcgacggatccgccgcaatgtccttcgcgatgacgctgagcgtctccagctgcatgcgcttgcctgtgtgacgtccgtggtcacgcgcgcgtagcagccagtccaggaagaaggcggtggcgcgcttgtagcgcgagtacttggacgcagggaacgacgacatgcgcgctagacttgcttttcatcaagagtgattcatgctctttcgtaagacgatatttagccccagagagcctaccgtaagacaaagcgtcttgcgttttgcaatcaacgcattttggctacatcttggttttagtataccagtggctgcattgtattttgtccgtcaaaacgtaagacagtttgtcggacaacaatttgcaccatgcgattggccaaaactttctgcacgaaagagggtagtgtcgttgcgtgcgttccatgtaggaaccctagacaaccgctttgccgtttttgaattgctcgtgcgacctacagtcgagccgacgaaatggaggaggaagggatcagataaggaatcggtatcaggagccgagatggtgcaaccgactgtgattctcatgttgaagtgatgtttcaaaaacgagaaaaaaatacttagaaaaaatagaaagtgagtgtgccgtacttttgacaagctggaaaactgcctcgatggcgcaataggtgtggttcgtgcttcccgatgggcggacagagttcgtcatgttggatggggctagcgtcgtgaatggctttctagagaagatccttcgcaagtgctcgcaagagttgcgtggggtcaatcgaagtcaggtgaatatctacgaccctcgcgtaccggaggaagacaagaaacctctacggctggcaactccactggatggccttggagtaaaactggaggaagctctaattgtgcaagtggagctgaacgcgccgatctttgttaaccagatttatctgcacggcctgagcacggactcgccccacctcgagcgcgaagaacttatggaaagagtgtacacgagtttgtgggcggataacaaccgattcgtcctcttatcagcgcctccagccccgggaaagtcctcgctgttgatcctgtttgctcatcggtacacccacttgaactgcatgtatgtcatcgtggctgccggacaacgtccgctttatcatctctgctgggaccacgcgaagatctggagtcgagagccccaaggagtttcgaactctcgtgacgtttggaagacgtgatttcttgcttagtgacgaagaaacgagagagtttttggatttcccaggcatgggtttgcccgatcgattcaagaaagaacaatttgtcgattttctggttcgtgaggcctgttgggcttggtagcgcgctgcggatatcgatcaacgcagccaaagtggaaatcgatgactattcaccgattgatgaggcacttgttgtcacacaactgccgtacgagagcgccaaggtgcttcggccgagaccacgacacgccgatcagttcgaaggctcgacaatttctgatcaaatgtttcctcaaggctccacaccctgtgcaactaccatccgaaatggcaacgaaacttactacgagtgacattaagtgcctcacggcatttcagaacgctggaatcctcgtcgaggatgacgctaaactgatgggattctcgtctccgttcgcagcaagatacctcactgcccttagggcatgccttctgctctttttgcaaagaaaaaagatgggattcgacgtcaaacaccgcccttgttacagtatctgcctgcactacccacaccttttagggagtttttgcgtgaagccccactgacttcgttttggcatcgtaccatgacttgtacatcccgacatagaatttgtctttccccatcatcttcgtcctgatactaatcggagtctcccccatcttgtacaagaacctcatgacgctctccaagatggcatcatcagcagaactcactgagttgcatggttatctatgtgtctcaatgcaggttagggttaccagccggaagaggggggggtgaaagcgatttccacccaactgaggttnnnnnnnnnnnnnnnnnnnnnnnnnnnnnnnnnnnnnnnnnnnnnnnnnnnnnnnnnnnnnnnnnnnnnnnnnnnnnnnnnnnnnnnnnnnnnnnnnnnnnnnnnnnnnnnnnnnnnnnnnnnnnnnnnnnnnnnnnnnnnnnnnnnnnnnnnnnnnnnnnnnnnnnnnnnnnnnnnnnnnnnnnnnnnnnnnnnnnnnnnnnnnnnnnnnnnnnnnnnnnnnnnnnnnnnnnnnnnnnnnnnnnnnnnnnnnnnnnnnnnnnnnnnnnnnnnnnnnnnnnnnnnnnnnnnnnnnnnnnnnnnnnnnnnnnnnnnnnnnnnnnnnnnnnnnnnnnnnnnnnnnnnnnnnnnnnnnnnnnnnnnnnnnnnnnnnnnnnnnnnnnnnnnnnnnnnnnnnnnnnnnnnnnnnnnnnnnnnnnnnnnnnnnnnnnnnnnnnnnnnnnnnnnnnnnnnnnnnnnnnnnnnnnnnnnnnnnnnnnnnnnnnnnnnnnnnnnnnnnnnnnnnnnnnnnnnnnnnnnnnnnnnnnnnnnnnnnnnnnnnnnnnnnnnnnnnnnnnnnnnnnnnnnnnnnnnnnnnnnnnnnnnnnnnnnnnnnnnnnnnnnnnnnnnnnnnnnnnnnnnnnnnnnnnnnnnnnnnnnnnnnnnnnnnnnnnnnnnnnnnnnnnnnnnnnnnnnnnnnnnnnnnnnnnnnnnnnnnnnnnnnnnnnnnnnnnnnnnnnnnnnnnnnnnnnnnnnnnnnnnnnnnnnnnnnnnnnnnnnnnnnnnnnnnnnnnnnnnnnnnnnnnnnnnnnnnnnnnnnnnnnnnnnnnnnnnnnnnnnnnnnnnnnnnnnnnnnnnnnnnnnnnnnnnnnnnnnnnnnnnnnnnnnnnnnnnnnnnnnnnnnnnnnnnnnnnnnnnnnnnnnnnnnnnnnnnnnnnnnnnnnnnnnnnnnnnnnnnnnnnnnnnnnnnnnnnnnnnnnnnnnnnnnnnnnnnnnnnnnnnnnnnnnnnnnnnnnnnnnnnnnnnnnnnnnnnnnnnnnnnnnnnnnnnnnnnnnnnnnnnnnnnnnnnnnnnnnnnnnnnnnnnnnnnnnnnnnnnnnnnnnnnnnnnnnnnnnnnnnnnnnnnnnnnnnnnnnnnnnnnnnnnnnnnnnnnnnnnnnnnnnnnnnnnnnnnnnnnnnnnnnnnnnnnnnnnnnnnnnnnnnnnnnnnnnnnnnnnnnnnnnnnnnnnnnnnnnnnnnnnnnnnnnnnnnnnnnnnnnnnnnnnnnnnnnnnnnnnnnnnnnnnnnnnnnnnnnnnnnnnnnnnnnnnnnnnnnnnnnnnnnnnnnnnnnnnnnnnnnnnnnnnnnnnnnnnnnnnnnnnnnnnnnnnnnnnnnnnnnnnnnnnnnnnnnnnnnnnnnnnnnnnnnnnnnnnnnnnnnnnnnnnnnnnnnnnnnnnnnnnnnnnnnnnnnnnnnnnnnnnnnnnnnnnnnnnnnnnnnnnnnnnnnnnnnnnnnnnnnnnnnnnnnnnnnnnnnnnnnnnnnnnnnnnnnnnnnnnnnnnnnnnnnnnnnnnnnnnnnnnnnnnnnnnnnnnnnnnnnnnnnnnnnnnnnnnnnnnnnnnnnnnnnnnnnnnnnnnnnnnnnnnnnnnnnnnnnnnnnnnnnnnnnnnnnnnnnnnnnnnnnnnnnnnnnnnnnnnnnnnnnnnnnnnnnnnnnnnnnnnnnnnnnnnnnnnnnnnnnnnnnnnnnnnnnnnnnnnnnnnnnnnnnnnnnnnnnnnnnnnnnnnnnnnnnnnnnnnnnnnnnnnnnnnnnnnnnnnnnnnnnnnnnnnnnnnnnnnnnnnnnnnnnnnnnnnnnnnnnnnnnnnnnnnnnnnnnnnnnnnnnnnnnnnnnnnnnnnnnnnnnnnnnnnnnnnnnnnnnnnnnnnnnnnnnnnnnnnnnnnnnnnnnnnnnnnnnnnnnnnnnnnnnnnnnnnnnnnnnnnnnnnnnnnnnnnnnnnnnnnnnnnnnnnnnnnnnnnnnnnnnnnnnnnnnnnnnnnnnnnnnnnnnnnnnnnnnnnnnnnnnnnnnnnnnnnnnnnnnnnnnnnnnnnnnnnnnnnnnnnnnnnnnnnnnnnnnnnnnnnnnnnnnnnnnnnnnnnnnnnnnnnnnnnnnnnnnnnnnnnnnnnnnnnnnnnnnnnnnnnnnnnnnnnnnnnnnnnnnnnnnnnnnnnnnnnnnnnnnnnnnnnnnnnnnnnnnnnnnnnnnnnnnnnnnnnnnnnnnnnnnnnnnnnnnnnnnnnnnnnnnnnnnnnnnnnnnnnnnnnnnnnnnnnnnnnnnnnnnnnnnnnnnnnnnnnnnnnnnnnnnnnnnnnnnnnnnnnnnnnnnnnnnnnnnnnnnnnnnnnnnnnnnnnnnnnnnnnnnnnnnnnnnnnnnnnnnnnnnnnnnnnnnnnnnnnnnnnnnnnnnnnnnnnnnnnnnnnnnnnnnnnnnnnnnnnnnnnnnnnnnnnnnnnnnnnnnnnnnnnnnnnnnnnnnnnnnnnnnnnnnnnnnnnnnnnnnnnnnnnnnnnnnnnnnnnnnnnnnnnnnnnnnnnnnnnnnnnnnnnnnnnnnnnnnnnnnnnnnnnnnnnnnnnnnnnnnnnnnnnnnnnnnnnnnnnnnnnnnnnnnnnnnnnnnnnnnnnttgacgaaatgattgtgacagtttgcctggattcactgacgcaggtatagttgtacagtatagtactgacacgtccatacaatttttaagtcaaatttggagctatagtaataccacaaatagtacacgtaggtagcgtgttacctacaaaaatactatataaaattgtagtgcttggtggttatactttttgcactatacaacttgtctgttattctgcaataatctttattcgttggtcgtcttgacgactcaacaaaatacaagggtctaagcttctccactattgttttgcatctgcccttccgccgacataacccagctttttcgcgatagaacaaagtgtataagctcaacggacccaggagatggtgcattccctaaaataaaattgtcatttggtttccatgcatccataatagctttagataaaataggttatcttcaatagaccaaggttatgtgaagccaagtacccagtcctattaaagtgccaaggtagcaataggatagccttgcggaataccaaccgctccaacctcctctacaggtccttcgtccacggatcctgcaaactcaggaatgagccgcgttcgagttgagcgagattgggcttttcgagttgagtaagagattctgatgtgagatcttcaccttcatcaattcccttggcctgggtgtacggccccggagtctacggtcccggcgtctacggccctggtgtctacggccccggtgtgggcgtgggcgtgggcggttatggcgcgcctgctgcccccgcggcttacaacagctacccgagcacgaacggcggcggtgccacagcaagtgcgtcagcgactgcgaacgccaaccgcgagctccgctcgcaggaatgagtggggaggcttcgtacatctacccaacccaacccaacccaacccaacccaacccaacccaacccaacccaacccaacccaactcaccgaagcttgtatttccgtgagcggtatcaatgttatcgagttttagtctctgtctgcgtagcaacgaaagaaatacaagtctagcttcctcgtacccttactcccgtctagcttcctcagaacctcactcttgttgtatctgaaaacgctccagctacgaagtgctacaggcagtctctcggcccgacatgaagtcggtacatgtcgattttgccgacccagcagactttgcacgacacacaataaaaaagaagcaaaggagtcacctctgtaagatgcacgcttgtgattcggttttgaagtatagtattcatacatagtcgtcgtcaagtcagtacctagtacgtcaagt

(The sequence listing continues in the following parts.)

1. A method for assessing whether a Phytophthora pathogen is virulent or avirulent, comprising:
(a) determining, in a sample comprising Phytophthora nucleic acid, the presence or absence of one or more Avr gene variations in the Phytophthora nucleic acid; and
(b) determining whether the Phytophthora pathogen is virulent or avirulent on the basis of the presence or absence of the one or more variations.

2. The method of claim 1, wherein the one or more variations are comprised in one or more of Avr1a, Avr1b, Avr1c, Avr1d, Avr1k, Avr3a and Avr6 or a flanking region thereof.

3. The method of claim 1 or 2, wherein the one or more variations are each independently a substitution, deletion or insertion of one or more nucleotides.

4. (canceled)

5. The method of claim 1, wherein the variations are one or more indels and/or SNPs corresponding to one or more indels and/or SNPs set forth in FIGS. 1 (Avr1a), 3 (Avr1b), 5 (Avr1c), 7 (Avr1c), 9 (Avr1k), 11 (Avr3a) and/or 12 (Avr6), 16-23 and/or Table 4 and/or 5.

6. (canceled)

7. The method of claim 1, wherein the presence or absence of the one or more variations is determined using an amplification method.

8-9. (canceled)

10. The method of claim 7, wherein the amplification is carried out as one or more multiplex amplifications for determination of the presence or absence of two or more variations in each amplification reaction.

11. The method of claim 10, wherein the one or more multiplex amplifications comprises or consists of two multiplex amplifications.

12. The method of claim 11, wherein the two multiplex amplifications comprise (a) a first multiplex amplification to determine the presence or absence of one or more indels and/or SNPs corresponding to one or more indels and/or SNPs in Avr1a shown in FIGS. 1, 16 and/or 23, and/or Table 4 and/or 5 one or more indels and/or SNPs corresponding to one or more indels and/or SNPs in Avr1b, Avr1d, Avr1k, Avr3a and Avr6 shown in FIGS. 3, 7, 9, 11, 13 and/or 17 and 19-23, and/or Table 4 and/or 5; and (b) a second amplification to determine the presence or absence of one or more indels and/or SNPs corresponding to one or more indels and/or SNPs in Avr1c shown in FIGS. 5, 18, and/or 23, and/or Table 4 and/or 5.

13-16. (canceled)

17. The method of claim 1, wherein the Phytophthora pathogen is Phytophthora sojae.

18. A method for assessing risk of Phytophthora pathogen infection of a soybean plant:
(a) assessing, in a sample obtained from the plant, the soil, the water, the seeds, the air, or any culture containing one or several isolates of Phytophthora pathogen, whether the sample comprises a virulent or avirulent Phytophthora pathogen using the method of claim 1; and
(b) assessing the risk of Phytophthora pathogen infection of the soybean plant on the basis of the assessment made in (a), wherein the presence of a virulent Phytophthora pathogen in the sample is indicative of an elevated risk of Phytophthora pathogen infection of the soybean plant.

19. (canceled)

20. A method for selecting a soybean cultivar for planting in an agricultural area, comprising:
(a) assessing, in a sample obtained from the plant, the soil, the water, the seeds, the air, or any culture containing one or several isolates of Phytophthora pathogen, whether the sample comprises a virulent or avirulent Phytophthora pathogen using the method of claim 1;
(b) if the sample comprises a virulent Phytophthora pathogen, selecting a soybean cultivar comprising one or more resistances (Rps) genes that confer resistance to the one or more Avr genes identified in the sample that confer virulence, for planting in the agricultural area.

21. A collection, kit or package comprising one or more oligonucleotides for determining the presence or absence of one or more Avr gene variations in the nucleic acid of a Phytophthora pathogen.

22. The collection, kit or package of claim 21, wherein the one or more variations are comprised in one or more of Avr1a, Avr1b, Avr1c, Avr1d, Avr1k, Avr3a and Avr6 or a flanking region thereof.

23. The collection, kit or package of claim 21 or 22, wherein the one or more variations are each independently a substitution, deletion or insertion of one or more nucleotides.

24. (canceled)

25. The collection, kit or package of claim 21, wherein the variations are one or more indels and/or SNPs corresponding to one or more indels and/or SNPs set forth in FIGS. 1 (Avr1a), 3 (Avr1b), 5 (Avr1c), 7 (Avr1d), 9 (Avr1k), 11 (Avr3a) and/or 12 (Avr6), 16-23 and/or Table 4 and/or 5.

26. (canceled)

27. The collection, kit or package of claim 21, wherein the presence or absence of the one or more variations is determined using an amplification method.

28-29. (canceled)

30. The collection, kit or package of claim 27, wherein the one or more oligonucleotides are for use in one or more multiplex amplifications for determination of the presence or absence of two or more variations in each amplification reaction.

31. The collection, kit or package of claim 30, wherein the one or more multiplex amplifications comprises or consists of two multiplex amplifications.

32. The collection, kit or package of claim 31, wherein the two multiplex amplifications comprise (a) a first multiplex amplification to determine the presence or absence of one or more indels and/or SNPs corresponding to one or more indels and/or SNPs in Avr1a shown in FIGS. 1, 16 and/or 23, and/or Table 4 and/or 5 one or more indels and/or SNPs corresponding to one or more indels and/or SNPs in Avr1b, Avr1d, Avr1k, Avr3a and Avr6 shown in FIGS. 3, 7, 9, 11, 13 and/or 17 and 19-23, and/or Table 4 and/or 5; and (b) a second amplification to determine the presence or absence of one or more indels and/or SNPs corresponding to one or more indels and/or SNPs in Avr1c shown in FIGS. 5, 18, and/or 23, and/or Table 4 and/or 5.

33-36. (canceled)

37. The collection, kit or package of claim 21, wherein the Phytophthora pathogen is Phytophthora sojae.

38. (canceled)
